(19) United States
(12) Patent Application Publication
(10) Pub. No.: US 2007/0093443 A1
(43) Pub. Date: Apr. 26, 2007

(54) Modified proteases that inhibit complement activation

(76) Inventors: Edwin L. Madison, San Francisco, CA (US); Jack Nguyen, San Francisco, CA (US); Sandra Waugh Ruggles, Sunnyvale, CA (US); Christopher Thanos, San Francisco, CA (US)

Correspondence Address: Stephanie Seidman;Fish & Richardson P.C., 12390 El Camino Real, San Diego, CA, 92130-2081, US

(21) Appl. No.: 11/584,776

(22) Filed: Oct. 20, 2006

Related U.S. Application Data
(60) Provisional application No. 60/729,817, filed on Oct. 21, 2005.

(51) Int. Cl. A61K 48/00; C12N 15/09

(52) U.S. Cl. 514/44; 435/455

(57) ABSTRACT

Provided are methods for and compounds for modulating the complement system. In particular, compounds are provided that inhibit complement activation and compounds are provided that promote complement activation. The compounds are therapeutics by virtue of their effects on the complement system. Hence, the compounds that inhibit complement activation can be used for treatment of ischemic and reperfusion disorders, including myocardial infarction and stroke, sepsis, autoimmune diseases, inflammatory diseases and diseases with an inflammatory component, including Alzheimer's Disease and other neurodegenerative disorder.

### RELATED APPLICATIONS

[0001] Benefit of priority is claimed to U.S. provisional application Ser. No. 60/729,817, filed Oct. 21, 2005, entitled “MODIFIED PROTEASES THAT INHIBIT COMPLEMENT ACTIVATION,” to Edwin Madison. The subject matter of this application is incorporated by reference in it entirety.

[0002] This application is related to International PCT application No. (Attorney Docket No. 19049-003WO1/4903PC), filed Oct. 20, 2006, entitled “MODIFIED PROTEASES THAT INHIBIT COMPLEMENT ACTIVATION,” to Edwin Madison, Jack Nguyen, Sandra Waugh Ruggles and Christopher Thanos, which also claims priority to U.S. Provisional Application Ser. No. 60/729,817. This application also is related to U.S. application Ser. No. 10/677,977, filed Oct. 02, 2003, entitled Methods of Generating and Screening for Proteases with Altered Specificity; to U.S. application Ser. No. 11/104,110, filed Apr. 12, 2005, entitled Cleavage of VEGF and VEGF Receptor by Wild-Type and Mutant MTSP-1; and to U.S. application Ser. No. 11/104,111, filed Apr. 12, 2005, entitled Cleavage of VEGF and VEGF Receptor by Wild-Type and Mutant Protease.

[0003] The subject matter of each of the above-noted applications is incorporated by reference in its entirety.

### INCORPORATION BY REFERENCE OF SEQUENCE LISTING PROVIDED ON COMPACT DISCS

[0004] An electronic version on compact disc (CD-R) of the Sequence Listing is filed herewith in duplicate (labeled Copy #1 and Copy #2), the contents of which are incorporated by reference in their entirety. The computer-readable file on each of the aforementioned compact discs, created on Oct. 20, 2006, is identical, 2,075 kilobytes in size, and titled 4903SEQ.001.txt.

### FIELD OF INVENTION

[0005] Provided are methods for and compounds for modulating the complement system. In particular, compounds are provided that inhibit complement activation and compounds are provided that promote complement activation. The compounds are therapeutics by virtue of their effects on the complement system. Hence, the compounds that inhibit complement activation can be used for treatment of ischemic and reperfusion disorders, including myocardial infarction and stroke, sepsis, autoimmune diseases, inflammatory diseases and diseases with an inflammatory component, including Alzheimer's Disease and other neurodegenerative disorders.

### BACKGROUND

[0006] The complement (C) system is part of the immune system and plays a role in eliminating invading pathogens and in initiating the inflammatory response. The complement system of humans and other mammals involves more than 30 soluble and membrane-bound proteins that participate in an orderly sequence of reactions resulting in complement activation. The blood complement system has a wide array of functions associated with a broad spectrum of host defense mechanisms including anti-microbial and anti-viral actions. Products derived from the activation of C components include the non-self recognition molecules C3b, C4b and C5b, as well as the anaphylatoxins C3a, C4a and C5a that influence a variety of cellular immune responses. These anaphylatoxins also act as pro-inflammatory agents.

[0007] The complement system is composed of an array of enzymes and non-enzymatic proteins and receptors. Complement activation occurs by one of three primary modes known as the “classical” pathway, the “alternative” pathway and the “lectin” pathway (see FIG. 1). These pathways can be distinguished by the process that initiates complement activation. The classical pathway is initiated by antibody-antigen complexes or aggregated forms of immunoglobulins; the alternative pathway is initiated by the recognition of structures on microbial and cell surfaces; and the lectin pathway, which is an antibody-independent pathway, is initiated by the binding of mannan binding lectin (MBL, also designated mannose binding protein) to carbohydrates such as those that are displayed on the surface of bacteria or viruses. Activation of the cascades results in production of complexes involved in proteolysis or cell lysis and peptides involved in opsonization, anaphylaxis and chemotaxis.

[0008] The complement cascade, which is a central component of an animal's immune response, is an irreversible cascade. Numerous protein cofactors regulate the process. Inappropriate regulation, typically inappropriate activation, of the process is a facet of or can occur in a variety of disorders that involve inappropriate inflammatory responses, such as those observed in acute and chronic inflammatory diseases. These diseases and disorders include autoimmune diseases, such as rheumatoid arthritis and lupus, cardiac disorders and other inflammatory diseases, such as sepsis and ischemia-reperfusion injury.

[0009] Because of the involvement of the complement pathways in a variety of diseases and conditions, components of the complement pathways are targets for therapeutic intervention, particularly for inhibition of the pathway. Examples of such therapeutics include synthetic and natural small molecule therapeutics, antibody inhibitors, and recombinant soluble forms of membrane complement regulators. There are limitations to strategies for preparing such therapeutics. Small molecules have short half-lives in vivo and need to be continually infused to maintain complement inhibition thereby limiting their role, especially in chronic diseases. Therapeutic antibodies result in an immune response in a subject, and thus can lead to complications in treatment, particularly treatments designed to modulate immune responses. Thus, there exists an unmet need for therapeutics for treatment of complement-mediated diseases and diseases in which complement activation plays a role. These include acute and chronic inflammatory diseases. Accordingly, among the objects herein, it is an object to provide such therapeutics to target the activation of the complement cascade and to provide therapeutics and methods of treatment of diseases.

### SUMMARY

[0010] Provided herein are therapeutics and methods that target the activation of the complement cascade and methods of treatment of diseases, including acute and chronic inflammatory diseases. The therapeutics are non-complement proteases that target complement pathway substrates. Included among the non-complement proteases are unmodified proteases that cleave their native substrate as well as a complement substrate and also proteases modified to have increased selectivity or substrate specificity for a target substrate. The modified proteases can exhibit reduced or altered activity with respect to their native substrates.

[0011] Among the methods provided herein are methods of modulating complement activation by contacting a non-complement protease with any one or more, such as 2, 3, 4, 5, 6, 7, 8, 9, 10, 11, 12, 13, 14, 15, 20, 25, 30 or more target substrates of a complement pathway, whereby a target substrate protein is cleaved such that complement activation in a pathway comprising the target substrate is altered. Uses of proteases for treatment and/or for forumation of medicaments also are provided. Target substrates for these methods and for any of the methods and uses provide herein are complement proteins, including: C1q, C2, C3, iC3, C4, iC4, C5, C6, C7, C8, C9, MBL, Factor B, Factor D, Factor P, MASP-1, MASP-2, C1r, C1s, C4b, C4a, C2b, C2a, C3b, C3a, Ba, Bb and ficolin. Contacting can be effected ex vivo, in vitro and/or in vivo. Exemplary targets include any of those having a sequence of amino acids set forth in any of SEQ ID NOS: 298, 299, 300, 302, 304, 305, 306, 311, 312, 313, 314, 315, 316, 317, 318, 319, 320, 321, 322, 326, 328, 330, 332, 334, 335, 338, 340, 344, 660-662 and a fragment of any of the targets that exhibits a complement pathway activity, or allelic or species variants thereof or polypeptides having 60, 70, 80, 85, 90, 95, 96, 97, 98, 99% or more sequence identity.

[0012] For all and for any methods and uses provided herein, the target substrates can be present in a body fluid or tissue sample, or can be a collection of target substrates or any other composition containing such substrates. Depending upon the target substrate(s), complement activation can be inhibited or activated. The methods target one or more any complement pathway. Thus, the complement pathway modulated can be selected from among one or more of the classical, alternative and lectin pathways of complement. The non-complement proteases contain modifications at any one or more amino acid residues, such as 1, 2, 3, 4, 5, 6, 7, 8, 9, 10, 12, 15, 20, 25, 30, 35 or more residues, compared to an unmodified or scaffold protease. The modified amino acid residue(s) increases one or both of specificity for a target substrate or activity towards a target substrate. Exemplary unmodified or scaffold proteases include any one of a serine protease, a cysteine protease, an aspartic protease, a threonine protease and a metallo-protease, such as, for example, granzyme B, granzyme A, granzyme M, cathepsin G, MT-SP1, neutrophil elastase, chymase, alpha-tryptase, beta-trypsase I or II, chymotrypsin, collagenase, factor XII, factor XI, factor CII, factor X, thrombin, protein C, u-plasminogen activator (u-PA), t-plasminogen activator (t-PA), plasmin, plasma kallikrein, chymotrypsin, trypsin, a cathepsin, papain, cruzain, a metalloprotease and allelic variations, isoforms and catalytically active portions thereof. For example, the scaffold protease comprises a sequence of amino acids set forth in any one of SEQ ID NOS: 2, 4, 8, 77, 79, 83, 85, 87, 89, 93, 99, 117, 119, 121, 123, 132, 134, 138, 142, 144, 146, 148, 162, 166, 168, 170, 172, 174, 176, 178, 180, 182, 190, 192, 194, 196, 198, 200, 202, 204, 206, 208, 218, 220, 222, 224, 226, 238, 248, 250, 260, 262, 280, 282, 373, 375, 377, 379, 381, 383, 385, 387, 547, 549, and 551 and catalytically active portions thereof, allelic and species variants thereof and polypeptides having 60, 70, 80, 85, 90, 95, 96, 97, 98, 99% or more sequence identity. MT-SP1 or a fragment thereof, such as the polypeptide sequence set forth in SEQ ID NO: 2 and 10, respectively, is exemplary of a scaffold protease. C2 or C3 proteins of a complement pathway(s) are exemplary target substrates of an MT-SP1 protease, modified MT-SP1 protease, or catalytically active portions thereof.

[0013] Modification of an MT-SP1 protease or a catalytically active portion thereof include modification(s) at positions 146, 224, 41, and/or 151, based on chymotrypsin numbering. Such modified MT-SP1 proteases include those with any of the following modifications: I41T/Y146D/G151L/K224F, I41T/Y146D/G151L/Q175D/K224F, I41T/Y146D/G151L/Q175D/K224L, I41T/Y146D/G151L/Q175D/K224R, AND I41T/Y146D/G151L/Q175D/K224N, I41T/Y146D/G151L/K224N, Y146D/G151L/K224N, I41T/Y146D/G151L/Q175K/K224F, I41T/Y146D/G151L/Q175R/K224F, I41T/Y146D/G151L/Q175H/K224F, I41T/Y146D/G151L/Q175Y/K224F, I41T/Y146D/G151L/Q175K/K224N, I41T/Y146D/G151L/Q175R/K224N, I41T/Y146D/G151L/Q175H/K224N, and I41T/Y146D/G151L/Q175Y/K224N, based on chymotrypsin numbering. In particular, a modified MT-SP1 contains amino acid modifications I41T/Y146D/G151L/K224F.

[0014] The modifications can be in any one or more amino acids that contribute to extended substrate specificity or secondary sites of interaction, such as, for example, modifications in an MT-SP1 protease or a catalytically active portion thereof that correspond to any one or more of amino acid positions 97, 146, 192, and 224 of an MT-SP1 protease, based on chymotrypsin numbering. Exemplary of such modifications are one or more of F97, Y146, Q192, and K224 of the MT-SP1 protease, based on chymotrypsin numbering, such as F97D, F97E, F97A, F97W, Y146N, Y146D, Y146E, Y146A, Y146W, Y146R, Q192R, Q192V, K224A, and K224F. Exemplary of such modified MT-SP1 proteases including those polypeptides having a sequence of amino acids set forth in any of SEQ ID NOS: 16, 18, 20, 22, 24, 26, 28, 30, 32, 34, 36, 14, 38, and 40 and 405-418. Other examples of a modified MT-SP1 protease or a catalytically active portion thereof include amino acid modifications Y146D/K224F or Y146E, such as those corresponding to a modified MT-SP1 polypeptide having a sequence of amino acids as set forth in SEQ ID NOS:12, 404, 28 or 412.

[0015] MT-SP1 protease and catalytically active portion thereof include polypeptides that contain one or more of the following modifications: F97N, F97D, F97E, F99Y, F99V, F99W, D217A, D217V, F97A, F97W, F99A, Y146N, Y146D, Y146E, Y146A, Y146W, Y146R, W215F, W215Y, Q192V, Q192R, Q192F, K224A, K224F, M180E, Y146D/K224F, D96A, Y146E/K224N, I41T/Y146E/Q175D/K224R, I41T/Y146D/K224F, I41T/Y146E/Q175D/K224N, I41T/Y146E/G151L/Q175D/K224L, Y146E/Q221aE/K224F, I41T/Y146E/G151L/Q175D/K224R, I41T/Y146E/G151L/Q175D/K224N, Q221aD, Y146E/K224R, Y146E/Q175D/K224N, Y146D/K224R, I41T/Y146E/G151L/Q175D/K224F, Y146E/Q175D/K224R, Y146E/L224L, G147E, Y146D/Q175D/K224R, Y146D/Q175L/K224L, Y146D/Q175L/K224L, Y146D/Q175W/K224L, Y146D/K224L, Y146E/Q221aE/K224R, Y146E/K224A, Y146D/Q175H/K224L, Y146D/Q175Y/K224L, Y146E/K224Y, Y146D/Q175F/K224L, Y146D/Q175F/K225L, Y146D/Q221aL/K224S, I41E/Y146D/K224L, Y146D/D217F/K224L, Y146D/D217F/K224L, H143V/Y146D/K224F, Y146E/K224F, Y146A/K224F, Y146E/K224T, I41T/Y146E/K224L, I41F/Y146D/K224F, I41L/Y146D/K224F, I41T/Y146D/G151L/K224F, I41A/Y146D/K224F, I41E/Y146D/K224F, I41D/Y146D/K224L, I41D/Y146D/K224F, Y146N/K224F, I41T/Y146D/Q175D/K224F, Q192F/K224F, Y146D/Q192A/K224F, Q192V/K224F, I41T/Y146D/Q175D/K224L, I41T/Y146D/Q175D/K224R, I41T/Y146D/Q175D/K224N, I41T/Y146D/G151L/Q175D/K224F, I41T/Y146D/G151L/Q175D/K224L, I41T/Y146D/G151L/Q175D/K224R, I41T/Y146D/G151L/Q175D/K224N, I41T/Y146E/Q175D/K224F, I41T/Y146E/Q175D/K224L, I41T/Y146D/G151L/K224N, Y146D/Q175D/K224N, Y146D/Q175D/K224N, Y146D/G151L/K224N, Y146D/Q175R/K224N, Y146D/Q175K/K224N, Y146D/Q175H/K224N, I41T/Y146D/G151L/Q175K/K224F, I41T/Y146D/G151L/Q175R/K224F, I41T/Y146D/G151L/Q175H/K224F, I41T/Y146D/G151L/Q175Y/K224F, I41T/Y146D/G151L/Q175K/K224N, I41T/Y146D/G151L/Q175R/K224N, I41T/Y146D/G151L/Q175H/K224N, and I41T/Y146D/G151L/Q175Y/K224N, based on chymotrypsin numbering. Exemplary of such modified MT-SP1 proteases, or catalytically active portions thereof, include those polypeptides having a sequence of amino acids set forth in any of SEQ ID NOS: 12, 14, 16, 18, 20, 22, 24, 26, 28, 30, 32, 34, 36, 38, 40-69, 404-418, 419-447, 524-533, 552-659, or 663-710. In particular, a modified MT-SP1 protease, or a catalytically active portion thereof, is one having a sequence of amino acids set forth in SEQ ID NOS: 596 or 650.

[0016] For all methods and uses provided herein, the modification can be selected such that the modified protease, such as MT-SP1, cleaves a substrate recognition site of the target substrate. Target substrate are any of the complement pathway polypeptides noted above and known to those of skill in the art, including for example, C2 and/or C3. For example, where the target substrate is C2 the substrate recognition site includes a sequence of amino acids of SLGR (SEQ ID NO:392).

[0017] Other recognition sites targeted in the methods and uses provided herein include a Factor I substrate recognition site, such as LPSR (SEQ ID NO:388), SLLR (SEQ ID NO:389), or HRGR (SEQ ID NO: 390). Modifications in the MT-SP1 protease or a catalytically active portion can correspond to any one or more of amino acid positions 174, 217, 96, 192, 146, or 99 of an MT-SP1 protease, based on chymotrypsin numbering, such as any one or more of amino acids Q174, D217, D96, Q192, Y146, and F99 of a MT-SP1 protease, based on chymotrypsin numbering. Exemplary of such modifications are modifications selected from among one ore more of: Q174H, D217Q, D217N, D217H, D96A, D96V, D96F, D96S, D96T, Q192L, Q192I, Q192F, Y146F, F99A, F99V, F99S, and F99G (see, e.g., the polypeptides having a sequence of amino acids set forth in any of SEQ ID NOS: 41-57 or 419-435.

[0018] Another recognition site includes the sequence of amino acids LPSR. Exemplary of a modified protease modified for recogniztion thereof are: an MT-SP1 protease or a catalytically active portion thereof having modifications at sites corresponding to any one or more of amino acid positions 174, 180, 215, 192, or 99 of an MT-SP1 protease, based on chymotrypsin numbering, such as, for example, any one or more of amino acids Q174, M180, W215, Q192, or F99 of a MT-SP1 protease, based on chymotrypsin numbering. Exemplary of such modifications is any one or more of Q174F, Q174V, Q174L, Q174Y, M180E, W215F, W215Y, Q192K, Q192R, Q192Y, and F99Y (see, e.g., modified MT-SP1 polypeptides having a sequence of amino acids as set forth in any of SEQ ID NOS: 36, 58, 59, 61, 62, 69, 416, 436, 437, 439, 440, 447, or 524-533).

[0019] Another substrate recognition site for use in the methods herein includes the sequence of amino acids HRGR. Exemplary of a protease with modifications to recognize such sites are an MT-SP1 protease or a catalytically active portion thereof that has modifications that correspond(s) to modifications at any one or more of amino acid positions 215, 174, 217, 192 and 99 of an MT-SP1 protease, based on chymotrypsin numbering, such as, for example, W215, Q174, D217, Q192 and F99 of an MT-SP1 protease, based on chymotrypsin numbering. Exemplary thereof ar modification selected from among: any one or more of W215F, W215Y, Q174A, Q174V, Q174F, Q174R, Q174K, D217A, D217V, Q192E, F99W and F99Y (e.g., an MT-SP1 protease or a catalytically active portion thereof corresponding to a modified MT-SP1 polypeptide containing a sequence of amino acids as set forth in any of SEQ ID NOS: 58-69 and 436-447.

[0020] Methods for treatment of complement-mediated disorders and disorders whose symptoms are ameliorated by modulating a complement pathway, including one or more of the classical, alternative and lectin pathways, are provided. In practicing the methods, one ore more non-complement proteases is/are contacted with one ore more target substrates, such as by administration in vitro, in vivo or ex vivo, whereby the non-complement protease cleaves any one or more target substrates of a complement pathway such that complement activation in a pathway comprising the target substrate is altered. Uses of the non-complement proteases for treatment of such diseases and disorders and/or for formulation of medicaments for such treatment also are provided. Modulation includes inhibition or enhancement (increasing) complement activation. Inhibition of of complement activation can lead to a reduction in inflammatory symptoms associated with a complement-mediated disorder. Exemplary of inflammatory disorders are neurodegenerative disorders and cardiovascular disorders, such as, but are not limited to, sepsis, Rheumatoid arthritis (RA), membranoproliferative glomerulonephritis (MPGN), Multiple Sclerosis (MS), Myasthenia gravis (MG), asthma, inflammatory bowel disease, immune complex (IC)-mediated acute inflammatory tissue injury, Alzheimer's Disease (AD), Ischemia-reperfusion injury and Guillan-Barre syndrome. Complement-mediated disorders can result from a treatment of a subject. Ischemia-reperfusion injury can be caused by an event or treatment selected from among myocardial infarct (MI), stroke, angioplasty, coronary artery bypass graft, cardiopulmonary bypass (CPB), and hemodialysis.

[0021] The methods of treatment provided herein can be effected by administering to a subject a non-complement protease effected prior to treatment of the subject for the manifested disorder. As noted administering can be effected by contacting a body fluid or tissue sample in vitro, ex vivo, or in vivo with a non-complement protease. Complement-mediated ischemia-reperfusion injury is exemplary of such disorders. The treatment causing such disorder is angioplasty or coronary artery bypass graft.

[0022] As noted above, in any of the methods and uses provide herein, target substrates include one or more of C1q, C2, C3, iC3, C4, iC4, C5, C6, C7, C8, C9, MBL, Factor B, Factor D, Factor P, MASP-1, MASP-2, C1r, C1s, C4b, C4a, C2b, C2a, C3b, C3a, Ba, Bb and ficolin, such as a substrate that contains a sequence of amino acids set forth in any one of SEQ ID NOS: 298, 299, 300, 302, 304, 305, 306, 311, 312, 313, 314, 315, 316, 317, 318, 319, 320, 321, 322, 326, 328, 330, 332, 334, 335, 338, 340, or 344, or is fragment thereof that exhibits a complement activity.

[0023] In these methods and uses and all methods and uses provided herein, the non-complement protease can include modifications at any one or more amino acid residues compared to an unmodified or scaffold protease, wherein the modified amino acid residue(s) increases one or both of specificity for a target substrate or activity towards a target substrate. Unmodified or scaffold protease include any one of a serine protease, cysteine protease, aspartic protease, threonine protease, or metallo-protease, such as granzyme B, granzyme A, granzyme M, cathepsin G, MT-SP1, neutrophil elastase, chymase, alpha-tryptase, beta-trypsase I or II, chymotrypsin, collagenase, factor XII, factor XI, factor CII, factor X, thrombin, protein C, u-plasminogen activator (u-PA), t-plasminogen activator (t-PA), plasmin, plasma kallikrein, chymotrypsin, trypsin, a cathepsin, papain, cruzain, a metalloprotease and allelic variations, isoforms and catalytically active portions thereof. Exemplary are those that contain or have a sequence of amino acids as set forth in any one of SEQ ID NOS: 2, 4, 8, 77, 79, 83, 85, 87, 89, 93, 99, 117, 119, 121, 123, 132, 134, 138, 142, 144, 146, 148, 162, 166, 168, 170, 172, 174, 176, 178, 180, 182, 190, 192, 194, 196, 198, 200, 202, 204, 206, 208, 218, 220, 222, 224, 226, 238, 248, 250, 260, 262, 280, 282, 373, 375, 377, 379, 381, 383, 385, 387, 547, 549, and 551 and catalytically active portions thereof. MT-SP1 is an exemplary scaffold protease provided herein and is as described above. Cleavage can be targeted to the recognition sequences as described above. Any modified MT-SP1 described herein can be used in the methods of treatment including such as any MT-SP1 described above. Exemplary of modified MT-SP1 polypeptides or catalytically active portions thereof for use in the treatment provided herein include any having a sequence of amino acids set forth in any of 12, 14, 16, 18, 20, 22, 24, 26, 28, 30, 32, 34, 36, 38, 40-69, 404-418, 419-447, 524-533, 552-659, or 663-710. In particular, an MT-SP1 polypeptide or catalytically active portion thereof for use in the treatments provided herein has a sequence of amino acids set forth in SEQ ID NOS:596 or 650.

[0024] In any or all of the methods and uses provided herein, a non-complement protease or a catalytically active portion thereof can be administered in combination with a second agent or treatment for treating a complement-mediated disorder or any other disorder. The second agent or treatment can be administered simultaneously, sequentially or intermittently with the non-complement protease. The second agent can be administered as a separate composition or in the same composition as the non-complement protease. Exemplary of second agents are anti-inflammatory agent and anticoagulants, such as, but not limited to, any one or more of an NSAID, antimetabolite, corticosteroid, analgesic, cytotoxic agent, pro-inflammatory cytokine inhibitor, anti-inflammatory cytokines, B cell targeting agents, compounds targeting T antigens, adhesion molecule blockers, chemokines receptor antagonists, kinase inhibitors, PPAR-γ ligands, complement inhibitors, heparin, warfarin, acenocoumarol, phenindione, EDTA, citrate, oxalate, argatroban, lepirudin, bivalirudin, and ximelagatran.

[0025] Also provided are combinations of the non-complement proteases and other elements, such as reagents, second agents, and devices and containers for administering the proteases and/o agents and any other elements. The combinations can be for practicing or effecting the methods and uses provided herein. Hence provided, for example, are combinations of elements that include: (a) a non-complement protease that cleaves any one or more complement target substrates of a complement pathway such that complement activation in a pathway comprising the target substrate is altered; and (b) a second agent or agents for treating a complement-mediated disorder, such as, but not limited to anti-inflammatory agent(s) or anticoagulant(s), such as, for example, any one or more of a NSAID, antimetabolite, corticosteroid, analgesic, cytotoxic agent, pro-inflammatory cytokine inhibitor, anti-inflammatory cytokines, B cell targeting agents, compounds targeting T antigens, adhesion molecule blockers, chemokines receptor antagonists, kinase inhibitors, PPAR-γ ligands, complement inhibitors, heparin, warfarin, acenocoumarol, phenindione, EDTA, citrate, oxalate, argatroban, lepirudin, bivalirudin, and ximelagatran.

[0026] As noted, the combinations are for practicing or effecting any of the methods herein for modulating a complement pathway, such as one or more of the classical, alternative, or lectin pathways of complement. Target substrates and scaffold proteases include any of those set forth above. For example, scaffold proteases include any set forth Table 14, and allelic variations, isoforms and catalytically active portions of the proteases set forth in Table 14. Exemplary of such proteases, include any that has or contains a sequence of amino acids set forth in any one of SEQ ID NOS: 2, 4, 8, 71, 73, 75, 77, 79, 81, 83, 85, 87, 89, 91, 93, 95, 97,99, 101, 103, 105, 107, 109, 111, 113, 115, 117, 119, 121, 123, 125, 127, 128, 130, 132, 134, 136, 138, 140, 142, 144, 146, 148, 150, 152, 154, 156, 158, 160, 162, 164, 166, 168, 170, 172, 174, 176, 178, 180, 182, 184, 186, 188, 190, 192, 194, 196, 198, 200, 202, 204, 206, 208, 210, 212, 214, 216, 218, 220, 222, 224, 226, 228, 230, 232, 234, 236, 238, 240, 242, 244, 246, 248, 250, 252, 254, 256, 258, 260, 262, 264, 266, 268, 269, 270, 272, 274, 276, 278, 280, 282, 284, 286, 287, 289, 291, 293, 295, 297, 373, 375, 377, 379, 381, 383, 385, 387, 544, 545, 547, 549, and 551, or a catalytically active portion thereof or an allelic or species variant thereof. In some examples, the protease used in the combinations is an MT-SP1 or catalytically active portion thereof, such as an MT-SP1 set forth in SEQ ID NO: 2 or 10, and the variants noted above. As noted above, MT-SP1 protease and catalytically active portion thereof include polypeptides that contain one or more of the following modifications: F97N, F97D, F97E, F99Y, F99V, F99W, D217A, D217V, F97A, F97W, F99A, Y146N, Y146D, Y146E, Y146A, Y146W, Y146R, W215F, W215Y, Q192V, Q192R, Q192F, K224A, K224F, M180E, Y146D/K224F, D96A, Y146E/K224N, I41T/Y146E/Q175D/K224R, I41T/Y146D/K224F, I41T/Y146E/Q175D/K224N, I41T/Y146E/G151L/Q175D/K224L, Y146E/Q221aE/K224F, I41T/Y146E/G151L/Q175D/K224R, I41T/Y146E/G151L/Q175D/K224N, Q221aD, Y146E/K224R, Y146E/Q175D/K224N, Y146D/K224R, I41T/Y146E/G151L/Q175D/K224F, Y146E/Q175D/K224R, Y146E/L224L, G147E, Y146D/Q175D/K224R, Y146D/Q175L/K224L, Y146D/Q175L/K224L, Y146D/Q175W/K224L, Y146D/K224L, Y146E/Q221aE/K224R, Y146E/K224A, Y146D/Q175H/K224L, Y146D/Q175Y/K224L, Y146E/K224Y, Y146D/Q175F/K224L, Y146D/Q175F/K225L, Y146D/Q221aL/K224S, I41E/Y146D/K224L, Y146D/D217F/K224L, Y146D/D217F/K224L, H143V/Y146D/K224F, Y146E/K224F, Y146A/K224F, Y146E/K224T, I41T/Y146E/K224L, I41F/Y146D/K224F, I41L/Y146D/K224F, I41T/Y146D/G151L/K224F, I41A/Y146D/K224F, I41E/Y146D/K224F, I41D/Y146D/K224L, I41D/Y146D/K224F, Y146N/K224F, I41T/Y146D/Q175D/K224F, Q192F/K224F, Y146D/Q192A/K224F, Q192V/K224F, I41T/Y146D/Q175D/K224L, I41T/Y146D/Q175D/K224R, I41T/Y146D/Q175D/K224N, I41T/Y146D/G151L/Q175D/K224F, I41T/Y146D/G151L/Q175D/K224L, I41T/Y146D/G151L/Q175D/K224R, I41T/Y146D/G151L/Q175D/K224N, I41T/Y146E/Q175D/K224F, I41T/Y146E/Q175D/K224L, I41T/Y146D/G151L/K224N, Y146D/Q175D/K224N, Y146D/Q175D/K224N, Y146D/G151L/K224N, Y146D/Q175R/K224N, Y146D/Q175K/K224N, Y146D/Q175H/K224N, I41T/Y146D/G151L/Q175K/K224F, I41T/Y146D/G151L/Q175R/K224F, I41T/Y146D/G151L/Q175H/K224F, I41T/Y146D/G151L/Q175Y/K224F, I41T/Y146D/G151L/Q175K/K224N, I41T/Y146D/G151L/Q175R/K224N, I41T/Y146D/G151L/Q175H/K224N, and I41T/Y146D/G151L/Q175Y/K224N, based on chymotrypsin numbering. Exemplary of such modified MT-SP1 proteases, or catalytically active portions thereof, include those polypeptides having a sequence of amino acids set forth in any of SEQ ID NOS: 12, 14, 16, 18, 20, 22, 24, 26, 28, 30, 32, 34, 36, 38, 40-69, 404-418, 419-447, 524-533, 552-659, or 663-710. In particular, a modified MT-SP1 protease, or a catalytically active portion thereof, is one having a sequence of amino acids set forth in SEQ ID NOS: 596 or 650. In some cases, the modifications in an MT-SP1 protease or a catalytically active portion thereof include modifications of any one or more amino acids that contribute to extended substrate specificity or secondary sites of interaction. Exemplary of this include, but are not limited to, any that correspond to any one or more of amino acid positions 97, 146, 192, and 224 of an MT-SP1 protease, based on chymotrypsin numbering. Exemplary of such modifications are modifications in any one or more of amino acids F97, Y146, Q192, and K224 of the MT-SP1 protease, based on chymotrypsin numbering, such as modification(s) in an MT-SP1 protease or a catalytically active portion thereof are selected from any one or more of F97D, F97E, F97A, F97W, Y146N, Y146D, Y146E, Y146A, Y146W, Y146R, Q192R, Q192V, K224A, and K224F (e.g., an MT-SP1 protease or a catalytically active portion thereof corresponds to a modified MT-SP1 polypeptide having a sequence of amino acids as set forth in any of SEQ ID NOS: 16, 18, 20, 22, 24, 26, 28, 30, 32, 34, 36, 14, 38, and 40 and 405-418 and/or in an MT-SP1 protease or a catalytically active portion thereof with modifications at positions Y146D and K224F or Y146E, such as those modified MT-SP1 polypeptides having a sequence of amino acids as set forth in SEQ ID NO: 12, 404, 28 or 412).

[0027] In the combinations and methods and uses provided herein, the non-complement protease can cleave a substrate recognition site of the target substrate. Exemplary recognition sites are set forth above.

[0028] Also provided are particular modified non-complement proteases. For example provided are non-complement proteases containing modifications in any one or more amino acids of a scaffold protease, where the modified amino acid residue(s) increases one or both of specificity for a target substrate or activity towards a target substrate, where the target substrate is a complement protein, such as any target substrate and mixture thereof and source thereof set forth above. The modified non-complement protease includes any suitable scaffold including any noted above, such as a scaffold protease selected from among granzyme B, granzyme A, granzyme M, cathepsin G, MT-SP1, neutrophil elastase, chymase, alpha-tryptase, beta-trypsase I or II, chymotrypsin, collagenase, factor XII, factor XI, factor CII, factor X, thrombin, protein C, u-plasminogen activator (u-PA), t-plasminogen activator (t-PA), plasmin, plasma kallikrein, chymotrypsin, trypsin, a cathepsin, papain, cruzain, a metalloprotease and allelic variations, isoforms and catalytically active portions thereof. Target substrates include any set forth above, such as, but not limited to C2 and/or C3.

[0029] Exemplary modified non-complement proteases include those based on an MT-SP1 scaffold (full-length or a catalytically active portion thereof). The MT-SP1 scaffold can include one, or at least two or more modifications, where one modification is at position 146 and the second modification is at position 224, based on chymotrypsin numbering, provided that:
[0030] (i) where the protease includes only two modifications, the protease does not include Y146D and K224F as the two modification; and (ii) where the protease contains three modifications, the protease does not include F99V or I or L or T with Y146D and K224F. For example, such modified non-complement protease can one containing at least two or more modifications, where one modification is a position 146 and the second is at position 224, based on chymotrypsin numbering, provided that: (i) where the protease includes only two modifications, the protease does not include Y146D and K224F as the two modification; and
[0031] (ii) where the protease contains three modifications, the protease does not include F99V or I or L or T with Y146D and K224F. An MT-SP1 protease, or catalytically portion thereof, also includes a modified protein containing one, or at least two or more modifications at position 141 and/or position 41. Exemplary of any of the above modified MT-S P1 proteases or catalytically active portions thereof include a modified MT-SP1 containing modifications of any of I41T/Y146D/G151L/K224F, I41T/Y146D/G151L/Q175D/K224F, I41T/Y146D/G151L/Q175D/K224L, I41T/Y146D/G151L/Q175D/K224R, AND I41T/Y146D/G151L/Q175D/K224N, I41T/Y146D/G151L/K224N, Y146D/G151L/K224N, I41T/Y146D/G151L/Q175K/K224F, I41T/Y146D/G151L/Q175R/K224F, I41T/Y146D/G151L/Q175H/K224F, I41T/Y146D/G151L/Q175Y/K224F, I41T/Y146D/G151L/Q175K/K224N, I41T/Y146D/G151L/Q175R/K224N, I41T/Y146D/G151L/Q175H/K224N, and I41T/Y146D/G151L/Q175Y/K224N based on chymotrypsin numbering.

[0032] Exemplary of such modified protease include an MT-SP1 protease or a catalytically active portion thereof selected from any one or more of D96A, D96V, D96F, D96F, D96S, D96T, F99S, F99G, Q174H, Q174A, Q174V, Q174F, Q174R, Q174K, Q174L, Q174Y, Q192L, Q192I, Q192E, Q192K, Q192Y, D217Q, D217N, D217H, K224A, based on chymotrypsin numbering. Exemplary are MT-SP1 proteases that contain or have a sequence of amino acids as set forth in any one of SEQ ID NOS: 41-51, 56, 57, 60-64, 67, 419-429, 431, 434, 435, 438-442, or 445.

[0033] Exemplary modified MT-SP1 proteases, or catalytically active portion thereof, also include any having any of the following modifications: Y146E/K224N, I41T/Y146E/Q175D/K224R, I41T/Y146D/K224F, I41T/Y146E/Q175D/K224N, I41T/Y146E/G151L/Q175D/K224L, Y146E/Q221aE/K224F, I41T/Y146E/G151L/Q175D/K224R, I41T/Y146E/G151L/Q175D/K224N, Q221aD, Y146E/K224R, Y146E/Q175D/K224N, Y146D/K224R, I41T/Y146E/G151L/Q175D/K224F, Y146E/Q175D/K224R, Y146E/L224L, G147E, Y146D/Q175D/K224R, Y146D/Q175L/K224L, Y146D/Q175L/K224L, Y146D/Q175W/K224L, Y146D/K224L, Y146E/Q221aE/K224R, Y146E/K224A, Y146D/Q175H/K224L, Y146D/Q175Y/K224L, Y146E/K224Y, Y146D/Q175F/K224L, Y146D/Q175F/K225L, Y146D/Q221aL/K224S, I41E/Y146D/K224L, Y146D/D217F/K224L, Y146D/D217F/K224L, H143V/Y146D/K224F, Y146E/K224F, Y146A/K224F, Y146E/K224T, I41T/Y146E/K224L, I41F/Y146D/K224F, I41L/Y146D/K224F, I41T/Y146D/G151L/K224F, I41A/Y146D/K224F, I41E/Y146D/K224F, I41D/Y146D/K224L, I41D/Y146D/K224F, Y146N/K224F, I41T/Y146D/Q175D/K224F, Q192F/K224F, Y146D/Q192A/K224F, Q192V/K224F, I41T/Y146D/Q175D/K224L, I41T/Y146D/Q175D/K224R, I41T/Y146D/Q175D/K224N, I41T/Y146D/G151L/Q175D/K224F, I41T/Y146D/G151L/Q175D/K224L, I41T/Y146D/G151L/Q175D/K224R, I41T/Y146D/G151L/Q175D/K224N, I41T/Y146E/Q175D/K224F, and I41T/Y146E/Q175D/K224L, I41T/Y146D/G151L/K224N, Y146D/Q175D/K224N, Y146D/Q175D/K224N, Y146D/G151L/K224N, Y146D/Q175R/K224N, Y146D/Q175K/K224N, Y146D/Q175H/K224N, I41T/Y146D/G151L/Q175K/K224F, I41T/Y146D/G151L/Q175R/K224F, I41T/Y146D/G151L/Q175H/K224F, I41T/Y146D/G151L/Q175Y/K224F, I41T/Y146D/G151L/Q175K/K224N, I41T/Y146D/G151L/Q175R/K224N, I41T/Y146D/G151L/Q175H/K224N, and I41T/Y146D/G151L/Q175Y/K224N, based on chymotrypsin numbering. Exemplary of such proteases are any having a sequence of amino acids set forth in any of SEQ ID NOS: 41-51, 56, 57, 60-64, 67, 69, 419-429, 431, 434, 435, 438-442, 445, 524, 525, 527-530, 532, 533, 552-659, or 663-710. In particular, an modified MT-SP1 protease or catalytically active portion thereof has a sequence of amino acids set forth in SEQ ID NOS: 596 or 650. Included among the modified MT-SP1 proteases, or catalytically active protions thereof, provided herein are those that cleave a target substrate, typically, at a substrate recognition site in the target substrate. Exemplary of target substrates include C2 or C3. Cleavage of C2 can be at a substrate recognition site SLGR (SEQ ID NO:392) in C2.

[0034] Among the modified non-complement protease that contain modifications in any one or more amino acids of a scaffold protease, where the modified amino acid residue(s) increases one or both of specificity for a target substrate or activity towards a target substrate, wherein the target substrate is a complement protein that are provided are such modified non-complement protease that not cleave a VEGF or VEGFR or that exhibit a reduction in any cleavage activity of a VEGF or VEGFR or that exhibit greater substrate specificity or activity for a target substrate such as a complement protein, than for VEGF or VEGFR with the modification compared to without the modification. For example, the non-complement protease cleaves a complement protein with at least or about 1-fold, 1.5-fold, 2-fold, 5-fold, 10-fold, 20-fold, 50-fold, 100-fold, 200-fold, 500-fold, 1000-fold, or more greater specificity or activity than it cleaves VEGF or VEGFR. The target substrates include complement proteins, such as, but not limited to any one or more of C1q, C2, C3, iC3, C4, iC4, C5, C6, C7, C8, C9, MBL, Factor B, Factor D, Factor P, MASP-1, MASP-2, C1r, C1s, C4b, C4a, C2b, C2a, C3b, C3a, Ba, Bb and ficolin. Exemplary target substrates include, but are not limited to target substrates containing a sequence of amino acids set forth in any one of SEQ ID NOS: 298, 299, 300, 302, 304, 305, 306, 311, 312, 313, 314, 315, 316, 317, 318, 319, 320, 321, 322, 326, 328, 330, 332, 334, 335, 338, 340 and 344 or a fragment thereof that exhibits a complement activity.

[0035] Scaffold proteases include any protease, including, a serine protease, cysteine protease, aspartic protease, threonine protease, or metallo-protease, such as any set forth in Table 14, and allelic and species variants thereof, isoforms and catalytically active portions, and modified forms thereof that have 60, 65, 70, 75, 80, 85, 90, 95, 96, 97, 98, 99% or more sequence identity to any provided in the Table or elsewhere herein, such as a scaffold protease that contains a sequence of amino acids as set forth in any one of SEQ ID NOS: 2, 4, 8, 71, 73, 75, 77, 79, 81, 83, 85, 87, 89, 91, 93, 95, 97, 99, 101, 103, 105, 107, 109, 111, 113, 115, 117, 119, 121, 123, 125, 127, 128, 130, 132, 134, 136, 138, 140, 142,144, 146, 148, 150, 152, 154, 156, 158, 160, 162, 164, 166, 168, 170, 172, 174, 176, 178, 180, 182, 184, 186, 188, 190, 192, 194, 196, 198, 200, 202, 204, 206, 208, 210, 212, 214, 216, 218, 220, 222, 224, 226, 228, 230, 232, 234, 236, 238, 240, 242, 244, 246, 248, 250, 252, 254, 256, 258, 260, 262, 264, 266, 268, 269, 270, 272, 274, 276, 278, 280, 282, 284, 286, 287, 289, 291, 293, 295, 297, 373, 375, 377, 379, 381, 383, 385, 387, 544, 545, 547, 549, and 551, and catalytically active portions thereof. The scaffolds can be used for preparing modified proteases and in any method or use herein. As discussed above, MT-SP1 or a catalytically active fragment thereof is exemplary of such proteases. An exemplary MT-SP1 protease or portion thereof has the sequence of amino acids set forth in SEQ ID NO: 2 or 10. Modification include any that alter substrate specificity or selectivity, particularly those that increase substrate specificity or selectivity for a complement protein. Exemplary of such modifications are MT-SP1 proteases or a catalytically active portions thereof with any of the following modifications D96A, D96V, D96F, D96F, D96S, D96T, F97D, F97E, F97A, F97W, F99A, F99S, F99G, F99W, F99Y, Y146N, Y146D, Y146E, Y146A, Y146W, Y146R, Q174H, Q174A, Q174V, Q174F, Q174R, Q174K, Q174L, Q174Y, M180E, Q192R, Q192V, Q192L, Q192I, Q192F, Q192E, Q192K, Q192Y, W215F, W215Y, D217Q, D217N, D217H, D217A, D217V, K224A, Y146E/K224N, I41T/Y146E/Q175D/K224R, I41T/Y146D/K224F, I41T/Y146E/Q175D/K224N, I41T/Y146E/G151L/Q175D/K224L, Y146E/Q221aE/K224F, I41T/Y146E/G151L/Q175D/K224R, I41T/Y146E/G151L/Q175D/K224N, Q221aD, Y146E/K224R, Y146E/Q175D/K224N, Y146D/K224R, I41T/Y146E/G151L/Q175D/K224F, Y146E/Q175D/K224R, Y146E/L224L, G147E, Y146D/Q175D/K224R, Y146D/Q175L/K224L, Y146D/Q175L/K224L, Y146D/Q175W/K224L, Y146D/K224L, Y146E/Q221aE/K224R, Y146E/K224A, Y146D/Q175H/K224L, Y146D/Q175Y/K224L, Y146E/K224Y, Y146D/Q175F/K224L, Y146D/Q175F/K225L, Y146D/Q221aL/K224S, I41E/Y146D/K224L, Y146D/D217F/K224L, Y146D/D217F/K224L, H143V/Y146D/K224F, Y146E/K224F, Y146A/K224F, Y146E/K224T, I41T/Y146E/K224L, I41F/Y146D/K224F, I41L/Y146D/K224F, I41T/Y146D/G151L/K224F, I41A/Y146D/K224F, I41E/Y146D/K224F, I41D/Y146D/K224L, I41D/Y146D/K224F, Y146N/K224F, I41T/Y146D/Q175D/K224F, Q192F/K224F, Y146D/Q192A/K224F, Q192V/K224F, I41T/Y146D/Q175D/K224L, I41T/Y146D/Q175D/K224R, I41T/Y146D/Q175D/K224N, I41T/Y146D/G151L/Q175D/K224F, I41T/Y146D/G151L/Q175D/K224L, I41T/Y146D/G151L/Q175D/K224R, I41T/Y146D/G151L/Q175D/K224N, I41T/Y146E/Q175D/K224F, and I41T/Y146E/Q175D/K224L, I41T/Y146D/G151L/K224N, Y146D/Q175D/K224N, Y146D/Q175D/K224N, Y146D/G151L/K224N, Y146D/Q175R/K224N, Y146D/Q175K/K224N, Y146D/Q175H/K224N, I41T/Y146D/G151L/Q175K/K224F, I41T/Y146D/G151L/Q175R/K224F, I41T/Y146D/G151L/Q175H/K224F, I41T/Y146D/G151L/Q175Y/K224F, I41T/Y146D/G151L/Q175K/K224N, I41T/Y146D/G151L/Q175R/K224N, I41T/Y146D/G151L/Q175H/K224N, and I41T/Y146D/G151L/Q175Y/K224N, based on chymotrypsin numbering. and allelic and species variants and isoforms thereof and variants with 60, 65, 70, 75, 80, 85, 90, 95, 96, 97, 98, 99% or more sequence identity therewith and including the corresponding modification. For example, modified MT-SP1 polypeptide containing a sequence of amino acids as set forth in any of SEQ ID NOS: 41-51, 56, 57, 60-64, 67, 69, 419-429, 431, 434, 435, 438-442, 445, 524, 525, 527-530, 532, 533, 552-659, or 663-710.

[0036] Also provided are pharmaceutical compositions containing any of the modified non-complement proteases or elements of the combinations provided herein. The pharmaceutical compositions include, as needed, pharmaceutically acceptable excipients and other components. The compositions are formulated for any desired or suitable route of administration, including, but not limited to systemic, oral, nasal, pulmonary, local, or topical administration.

[0037] Kits are provided. The kits can be used in practicing the methods. Kits containing the combinations are provided. Kits containing the pharmaceutical compositions also are provided. The kits also can contain devices for administration of the composition and/or proteases and, optionally, instructions for administration and other reagents and products employed in the methods.

[0038] Also provided are nucleic acid molecules that encode any of the the modified non-complement proteases. Included among these are nucleic acid molecules that encode or that hybridize under medium or high stringency to any nucleic acid that encodes any of the polypeptides set forth in any of SEQ ID NOS: 12, 14, 16, 18, 20, 22, 24, 26, 28, 30, 32, 34, 36, 38, 40-69, 404-418, 419-447, 524-533, 552-659, or 663-710. Also included among the nucleic acid molecules are those selected from among:

[0039] a) a nucleic acid molecule comprising a sequence of nucleotides set forth in any of SEQ ID NOS: 11, 13, 15, 17, 19, 21, 23, 25, 27, 29, 31, 33, 35, 37, 451-455, 457-462, 464-479, and 534-538;

[0040] b) a nucleic acid molecule comprising at least 60, 65, 70, 75, 80, 85, 90, 91, 92, 93, 94, 95, 96, 97, 98, 99% sequence identity to any of SEQ ID NOS: 11, 13, 15, 17, 19, 21, 23, 25, 27, 29, 31, 33, 35, 37, 451-455, 457-462, 464-479, 534-538;

[0041] c) a nucleic acid that hybridizes under conditions of medium or high stringency along at least 70% of its full length to a nucleic acid molecule comprising a sequence of nucleotides set forth in any of SEQ ID NOS: 11, 13, 15, 17, 19, 21, 23, 25, 27, 29, 31, 33, 35, 37, 451-455, 457-462, 464-479, 534-538;

[0042] d) a nucleic acid molecule that comprises degenerate codons of a), b), or c); or

[0043] e) a nucleic acid molecule comprising splice variants or allelic variants of any of SEQ ID NOS: 11, 13, 15, 17, 19, 21, 23, 25, 27, 29, 31, 33, 35, 37, 451-455, 457-462, 464-479, 534-538 or any of a)-d), or. nucleic acid molecule is selected from among:

[0044] a) a nucleic acid molecule comprising a sequence of nucleotides set forth in any of SEQ ID NOS: 480-493, 495-499, 501-506, 508-523, 539-543;

[0045] b) a nucleic acid molecule comprising at least 60, 65, 70, 75, 80, 85, 90, 91, 92, 93, 94, 95, 96, 97, 98, 99% sequence identity to any of SEQ ID NOS: 480-493, 495-499, 501-506, 508-523, 539-543;

[0046] c) a nucleic acid that hybridizes under conditions of medium or high stringency along at least 70% of its full length to a nucleic acid molecule comprising a sequence of nucleotides set forth in any of SEQ ID NOS: 480-493, 495-499, 501-506, 508-523, 539-543;

[0047] d) a nucleic acid molecule that comprises degenerate codons of a), b), or c); or

[0048] e) a nucleic acid molecule comprising splice variants or allelic variants of any of SEQ ID NOS: 480-493, 495-499, 501-506, 508-523, 539-543 or any of a)-d).

[0049] Vectors containing the nucleic acid molecules. Vectors include eukaryotic and prokaryotic expression vectors, including mammalian and yeast vectors. Cells containing the nucleic acid molecules and/or vectors also are provided. Exemplary expression vector include but are not limited to: an adenovirus vector, an adeno-associated virus vector, EBV, SV40, cytomegalovirus vector, vaccinia virus vector, herpesvirus vector, a retrovirus vector, a lentivirus vector and an artificial chromosome. Methods for production or preparation of the encoded non-complement proteases are provided. The vectors or nucleic acid molecules are introduced into cells and cultured under conditions, whereby the protease is expressed. The nucleic acid molecule can include sequence encoded a signal sequence to direct trafficking of the expressed protease, such as a signal sequence for secretion. The expressed proteases can be purified by routine methods known to those of skill in the art.

[0050] Methods of treatment by administering to a subject a nucleic acid molecule, vector or cell are provided. The diseases treated include any mediated by or involving a complement protein or the complement pathway, such as diseases with an underlying inflammatory component or pathology. Vectors include an expression vector that integrated into a host cell's chromosome or a vector that remains episomal. Administration can be in vivo or ex vivo. Ex vivo treatment includes administering the nucleic acid into a cell in vitro, followed by administration of the cell into the subject. The cell can be from a suitable (compatible) donor or from the subject, such as a human, to be treated.

[0051] Also provided are fusion proteins containing a catalytically active portion of any of the non-complement proteases hat is fused to a non-protease polypeptide. Fusion can be by insertion into the non-protease polypeptide or linkage at either end.

### BRIEF DESCRIPTION OF THE FIGURES

[0052] FIG. 1 depicts an overview of the classical, lectin, and alternative complement pathways and the activation of the terminal complement complex, the membrane attack complex (MAC). In particular, the figure depicts many of the more than 30 proteins that participate in the complement cascade, their action within the cascade, and where applicable, their points of convergence among the complement pathways. For example, the three pathways converge upon the generation of a C3 convertase, which cleaves C3 to form a C5 convertase yielding the formation of the MAC complex. The figure also depicts the generation of many of the complement cleavage products. All proteins depicted in the pathways can serve as substrate targets.

### DETAILED DESCRIPTION

Outline

A. Definitions

B. Target: Complement

[0053] 1. Nomenclature

[0054] 2. Pathways of Complement Initiation
[0055] a. Classical
[0056] b. Alternative
[0057] c. Lectin

[0058] 3. Complement-mediated effector functions
[0059] a. Complement-mediated lysis: Membrane Attack Complex
[0060] b. Inflammation
[0061] c. Chemotaxis
[0062] d. Opsonization
[0063] e. Activation of the Humoral Immune Response

[0064] 4. Complement Receptors

[0065] 5. Complement Regulation
[0066] a. Factor I

[0067] 6. Complement-Mediated Disease
[0068] a. Disease mediated by complement activation
   [0069] i. Rheumatoid Arthritis
   [0070] ii. Sepsis
   [0071] iii. Multiple Sclerosis
   [0072] iv. Alzheimer's Disease
   [0073] v. Ischemia-Reperfusion Injury
[0074] b. Disease mediated by complement deficiency
   C. Proteases

[0075] 1. Classes of proteases
[0076] a. Serine Proteases
   [0077] i. MT-SP1
   [0078] ii. Granzyme B
[0079] b. Cysteine Proteases
[0080] c. Aspartic Proteases
[0081] d. Metalloproteases
[0082] e. Threonine Proteases
   D. Scaffold Proteases

[0083] 1. Modified Scaffold Proteases
[0084] a. Rational Modification
   [0085] i. Synthesis of Positional Scanning Libraries and Screening using Fluorescence
[0086] b. Empirical Modification

[0087] 2. Methods of assessing specificity

[0088] 3. Protease polypeptides
[0089] a. MT-SP1 polypeptides
   E. Assays to Assess or Monitor Modified Protease Activity on Complement-Mediated Functions

[0090] a. Protein Detection
[0091] i. SDS-PAGE
[0092] ii. Enzyme Immunoassay
[0093] iii. Radial Immunodiffusion (RID)

[0094] b. Hemolytic assays

F. Methods of Producing Nucleic Acids Encoding Modified Proteases and Methods of Producing Modified Protease Polypeptides

[0095] 1. Vectors and Cells

[0096] 2. Expression
[0097] a. Prokaryotes
[0098] b. Yeast
[0099] c. Insect cells
[0100] d. Mammalian cells
[0101] e. Plants

[0102] 3. Purification Techniques

[0103] 4. Fusion Proteins

[0104] 5. Nucleotide sequences

G. Methods of Using: Formulations/Packaging/Administration

[0105] 1. Administration of modified protease polypeptides

[0106] 2. Administration of nucleic acids encoding modified protease polypeptide (gene therapy)

H. Therapeutic Uses

[0107] 1. Immune-mediated Inflammatory Disease

[0108] 2. Neurodegenerative Disease

[0109] 3. Cardiovascular Disease

I. Combination Therapies

J. Examples

### A. DEFINITIONS

[0110] Unless defined otherwise, all technical and scientific terms used herein have the same meaning as is commonly understood by one of skill in the art to which the invention(s) belong. All patents, patent applications, published applications and publications, Genbank sequences, databases, websites and other published materials referred to throughout the entire disclosure herein, unless noted otherwise, are incorporated by reference in their entirety. In the event that there are a plurality of definitions for terms herein, those in this section prevail. Where reference is made to a URL or other such identifier or address, it understood that such identifiers can change and particular information on the internet can come and go, but equivalent information can be found by searching the internet. Reference thereto evidences the availability and public dissemination of such information.

[0111] As used herein, MBL (mannose binding lectin) also is designated mannose-binding protein (MBP).

[0112] As used herein, complement activation refers to the sequential activation of serum components C1 through C9, initiated by a variety of activators including, for example, antigen-antibody complex, lipopolysaccharide, or microbial polysaccharides, and producing an inflammatory response via any pathway.

[0113] As used herein, a “complement protein” or a “complement component” is a protein of the complement system that functions in the host defense against infections and in the inflammatory process. Complement proteins constitute target substrates for the proteases and modified proteases provided herein.

[0114] Complement proteins are a group of interacting blood proteins and glycoproteins found in all vertebrates. There are at least 30 soluble plasma proteins in addition to cell surface receptors that bind complement reaction products and that occur on inflammatory cells and cells of the immune system. In addition, there are regulatory membrane proteins that protect host cells from accidental complement attack. Complement proteins include those that function in the classical pathway, for example, C2, those that function in the alternative pathway, for example, Factor B, and those that function in the lectin pathway, for example MASP-1. Among the complement proteins are proteases that participate in the complement pathways. In addition, as used herein, complement proteins include any of the “cleavage products” (also referred to as “fragments”) that are formed upon activation of the complement cascade. Also included among complement proteins are inactive or altered forms of complement proteins, such as iC3 and C3a-desArg.

[0115] Thus, complement proteins include, but are not limited to: C1q, C1r, C1s, C2, C3, C3a, C3b, C3c, C3dg, C3g, C3d, C3f, iC3, C3a-desArg, C4, C4a, C4b, iC4, C4a-desArg, C5, C5a, C5a-des-Arg, C6, C7, C8, C9, MASP-1, MASP-2, MBL, Factor B, Factor D, Factor H, Factor I, CR1, CR2, CR3, CR4, properdin, C1Inh, C4bp, MCP, DAF, CD59 (MIRL), clusterin and HRF and allelic and species variants of any complement protein.

[0116] As used herein, a “native” form of a complement protein is one which can be isolated from an organism such as a vertebrate in the absence of complement activation, and which has not been intentionally modified by man in the laboratory. Examples of native complement proteins include C1q, C1r, C1s, C2, C3, C4, Factor B, Factor D, properdin, C5, C6, C7, C6, and C9.

[0117] Generally, native complement proteins are inactive and acquire activity upon activation. Activation can require activation cleavage, maturation cleavage and/or complex formation with other proteins. An exception to this is Factor I and Factor D which have enzymatic activity in their native form. In some examples, activation of a native complement protein occurs following cleavage of the protein. For example, complement zymogens such as C2 and Factor B are proteases which are themselves activated by protease cleavage such that cleavage of C2 by the protease C1s generates C2b which associates with C4b to form the proteolytically active C4b2b (C3 convertase) and cleavage of Factor B by the protease Factor D generates Bb which associates with C3b to form the proteolytically active alternative C3 convertase, C3bBb. In another example, cleavage of an inactive native complement protein results in changes in the structural stability of a protein resulting in activation of the protein. For example, C3 and C4 contain an internal thioester bond which in the native protein is stable, but can become highly reactive and activated following conformational changes that result from cleavage of the protein. Thus, the cleavage products of C3 and C4 are biologically active. Activation of C3 and C4 also can occur spontaneously in the absence of cleavage. It is the spontaneous conversion of the thioester bond in native C3 that is an initiating event of the alternative pathway of complement. In other example, activation of a native complement protein occurs following the release of a complexed regulatory molecule that inhibits the activity of an otherwise active native complement protein. For example, C1inh binds to and inactivates C1s and C1r, unless they are in complex with C1q.

[0118] As used herein, maturation cleavage is a general term that refers to any cleavage required for activation of a zymogen. This includes cleavage that leads to a conformational change resulting in activity (i.e. activation cleavage). It also includes cleavage in which a critical binding site is exposed or a steric hindrance is exposed or an inhibitory segment is removed or moved.

[0119] As used herein, altered form of a complement protein refers to a complement protein that is present in a non-native form resulting from modifications in its molecular structure. For example, C3 reaction of the thioester with water can occur in the absence of convertase cleavage, giving a hydrolyzed inactive form of C3 and C4 termed iC3 and iC4. In another example, anaphylatoxins including C3a, C5a, and C4a can be desarginated by carboxypeptidase N into more stable, less active forms.

[0120] As used herein, a “fragment” or “cleavage product” of a complement protein is a subset of a complement protein that contains a portion of the polypeptide sequence of a native complement protein. A fragment of a complement protein usually results following the activation of any one or more, such 1, 2 or 3, of the complement cascades. Generally, a fragment results from the proteolytic cleavage of a native complement protein. For example, Factor B is enzymatically cleaved by Factor D, resulting in two fragments: Ba which constitutes the N-terminal portion of B; and Bb which constitutes the C-terminal portion and contains the serine protease site. A fragment of a complement protein also results from the proteolytic cleavage of another fragment of a complement protein. For example, C3b, a fragment generated from the cleavage of C3, is cleaved by Factor I to generate the fragments iC3b and C3f. Generally cleavage products of complement proteins are biologically active products and function as cleavage effector molecules of the complement system. Hence a fragment or portion of complement protein includes cleavage products of complement proteins and also portions of the proteins that retain or exhibit at least one activity.

[0121] As used herein, “cleavage effector molecules” or “cleavage effector proteins” refers to the active cleavage products generated as a result of the triggered-enzyme cascade of the complement system. A cleavage effector molecule, a fragment or cleavage product resulting from complement activation can contribute to any of one or more of the complement-mediated functions or activities, which include opsonization, anaphylaxis, cell lysis and inflammation. Examples of cleavage or effector molecules include, but are not limited to, C3a, C3b, C4a, C4b, C5a, C5b-9, and Bb. Cleavage effector molecules of the complement system, by virtue of participation in the cascade, exhibit activities that include stimulating inflammation, facilitating antigen phagocytosis, and lysing some cells directly. Complement cleavage products promote or participate in the activation of the complement pathways.

[0122] As used herein, anaphylatoxins (such as, for example, C3a, C4a or C5a) are cleavage effector proteins that trigger degranulation of (release of substances from) mast cells or basophils, which participate in the inflammatory response, particularly as part of defense against parasites. If the degranulation is too strong, it can cause allergic reactions. Anaphylatoxins also indirectly mediate spasms of smooth muscle cells (such as bronchospasms), an increase in permeability of blood capillaries, and chemotaxis.

[0123] As used herein, chemotaxis refers to receptor-mediated movement of leukocytes towards a chemoattractant typically in the direction of the increasing concentration thereof, such as in the direction of increasing concentration of an anaphylatoxin.

[0124] As used herein, opsonization refers to the alteration of the surface of a pathogen or other particle so that it can be ingested by phagocytes. A protein that binds or alters the surface of a pathogen is termed an opsonin. Antibody and complement proteins opsonize extracellular bacteria for uptake and destruction by phagocytes such as neutrophils and macrophages.

[0125] As used herein, cell lysis refers to the breaking open of a cell by the destruction of its wall or membrane. Hemolysis of red blood cells is a measure of cell lysis.

[0126] As used herein, “proteases,” “proteinases” and “peptidases” are interchangeably used to refer to enzymes that catalyze the hydrolysis of covalent peptidic bonds. These designations include zymogen forms and activated single-, two- and multiple-chain forms thereof. For clarity, reference to proteases refer to all forms. Proteases include, for example, serine proteases, cysteine proteases, aspartic proteases, threonine and metallo-proteases depending on the catalytic activity of their active site and mechanism of cleaving peptide bonds of a target substrate.

[0127] As used herein, a zymogen refers to a protease that is activated by proteolytic cleavage, including maturation cleavage, such as activation cleavage, and/or complex formation with other protein(s) and/or cofactor(s). A zymogen is an inactive precursor of a proteolytic enzyme. Such precursors are generally larger, although not necessarily larger, than the active form. With reference to serine proteases, zymogens are converted to active enzymes by specific cleavage, including catalytic and autocatalytic cleavage, or by binding of an activating co-factor, which generates an active enzyme. A zymogen, thus, is an enzymatically inactive protein that is converted to a proteolytic enzyme by the action of an activator. Cleavage can be effected autocatalytically. A number of complement proteins are zymogens; they are inactive, but become cleaved and activated upon the initiation of the complement system following infection. Zymogens, generally, are inactive and can be converted to mature active polypeptides by catalytic or autocatalytic cleavage of the proregion from the zymogen.

[0128] As used herein, a “proregion,” “propeptide,” or “pro sequence,” refers to a region or a segment that is cleaved to produce a mature protein. This can include segments that function to suppress enzymatic activity by masking the catalytic machinery and thus preventing formation of the catalytic intermediate (i.e., by sterically occluding the substrate binding site). A proregion is a sequence of amino acids positioned at the amino terminus of a mature biologically active polypeptide and can be as little as a few amino acids or can be a multidomain structure.

[0129] As used herein, an activation sequence refers to a sequence of amino acids in a zymogen that is the site required for activation cleavage or maturation cleavage to form an active protease. Cleavage of an activation sequence can be catalyzed autocatalytically or by activating partners.

[0130] Activation cleavage is a type of maturation cleavage in which a conformational change required for activity occurs. This is a classical activation pathway, for example, for serine proteases in which a cleavage generates a new N-terminus which interacts with the conserved regions of catalytic machinery, such as catalytic residues, to induce conformational changes required for activity. Activation can result in production of multi-chain forms of the proteases. In some instances, single chain forms of the protease can exhibit proteolytic activity as a single chain.

[0131] As used herein, domain refers to a portion of a molecule, such as proteins or the encoding nucleic acids, that is structurally and/or functionally distinct from other portions of the molecule and is identifiable.

[0132] As used herein, a protease domain is the catalytically active portion of a protease. Reference to a protease domain of a protease includes the single, two- and multi-chain forms of any of these proteins. A protease domain of a protein contains all of the requisite properties of that protein required for its proteolytic activity, such as for example, its catalytic center.

[0133] As used herein, a catalytically active portion of a protease refers to the protease domain, or any fragment or portion thereof that retains protease activity. Significantly, at least in vitro, the single chain forms of the proteases and catalytic domains or proteolytically active portions thereof (typically C-terminal truncations) exhibit protease activity.

[0134] As used herein, a “nucleic acid encoding a protease domain or catalytically active portion of a protease” refers to a nucleic acid encoding only the recited single chain protease domain or active portion thereof, and not the other contiguous portions of the protease as a continuous sequence.

[0135] As used herein, recitation that a polypeptide consists essentially of the protease domain means that the only portion of the polypeptide is a protease domain or a catalytically active portion thereof. The polypeptide can optionally, and generally will, include additional non-protease-derived sequences of amino acids.

[0136] As used herein, “S1-S4” refers to amino acid residues that form the binding sites for P1-P4 residues of a substrate (see, e.g., Schecter and Berger (1967) Biochem Biophys Res Commun 27:157-162). Each of S1-S4 contains one, two or more residues, which can be non-contiguous. These sites are numbered sequentially from the recognition site N-terminal to the site of proteolysis, referred to as the scissile bond.

[0137] As used herein, the terms “P1-P4” and “P1′-P4′” refer to the residues in a substrate peptide that specifically interact with the S1-S4 residues and S1′-S4′ residues, respectively, and are cleaved by the protease. P1-P4 refer to the residue positions on the N-terminal side of the cleavage site; P1′-P4′ refer to the residue positions to the C-terminal side of the cleavage site. Amino acid residues are labeled from N to C termini of a polypeptide substrate (Pi, . . . , P3, P2, P1, P1′, P2′, P3′, . . . , Pj). The respective binding subsites are labeled (Si, . . . , S3, S2, S1, S1′, S2′, S3′, . . . , Sj). The cleavage is catalyzed between P1 and P1′.

[0138] As used herein, a “binding pocket” refers to the residue or residues that interact with a specific amino acid or amino acids on a substrate. A “specificity pocket” is a binding pocket that contributes more energy than the others (the most important or dominant binding pocket). Typically, the binding step precedes the formation of the transition state that is necessary for the catalytic process to occur. S1-S4 and S1′-S4′ amino acids make up the substrate sequence binding pocket and facilitate substrate recognition by interaction with P1-P4 and P1′-P4′ amino acids of a peptide, polypeptide or protein substrate, respectively. Whether a protease interacts with a substrate is a function of the amino acids in the S1-S4 and S1′-S4′ positions. If the amino acids in any one or more of the S1, S2, S3, S4, S1′, S2′, S3′ and S4′ subsites interact with or recognize any one or more of the amino acids in the P1, P2, P3, P4, P1′, P2′, P3′ and P4′ sites in a substrate, then the protease can cleave the substrate. A binding pocket positions a target amino acid with a protease so that catalysis of a peptide bond and cleavage of a substrate is achieved. For example, serine proteases typically recognize P4-P2′ sites in a substrate; others proteases can have extended recognition beyond P4-P2′.

[0139] As used herein, amino acids that “contribute to extended substrate specificity” refers to those residues in the active site cleft in addition to the specificity pocket. These amino acids include the S1-S4, S1′-S4′ residues in a protease.

[0140] As used herein, secondary sites of interaction are outside the active site cleft. These can contribute to substrate recognition and catalysis. These amino acids include amino acids that can contribute second and third shell interactions with a substrate. For example, loops in the structure of a protease surrounding the S1-S4. S1′-S4′ amino acids play a role in positioning P1-P4, P1′-P4′ amino acids in the substrate thereby registering the scissile bond in the active site of a protease.

[0141] As used herein, active site of a protease refers to the substrate binding site where catalysis of the substrate occurs. The structure and chemical properties of the active site allow the recognition and binding of the substrate and subsequent hydrolysis and cleavage of the scissile bond in the substrate. The active site of a protease contains amino acids that contribute to the catalytic mechanism of peptide cleavage as well as amino acids that contribute to substrate sequence recognition, such as amino acids that contribute to extended substrate binding specificity.

[0142] As used herein, a catalytic triad of a serine or cysteine protease refers to a combination of three amino acids that are in the active site of a serine or cysteine protease and contribute to the catalytic mechanism of peptide cleavage. Generally, a catalytic triad is found in serine proteases and provides an active nucleophile and acid/base catalysis. The catalytic triad of serine proteases contains three amino acids, which in chymotrypsin are Asp¹⁰², His⁵⁷, and Ser¹⁹⁵. These residues are critical for the catalytic efficiency of a serine protease.

[0143] As used herein, the “substrate recognition site” or “cleavage sequence” refers to the sequence recognized by the active site of a protease that is cleaved by a protease. Typically, for example, for a serine protease, a cleavage sequence is made up of the P1-P4 and P1′-P4′ amino acids in a substrate, where cleavage occurs after the P1 position. Typically, a cleavage sequence for a serine protease is six residues in length to match the extended substrate specificity of many proteases, but can be longer or shorter depending upon the protease. For example, the substrate recognition site or cleavage sequence of MT-SP1 required for autocatalysis is RQARVV, where R is at the P4 position, Q is at the P3 position, A is at the P2 position and R is at the P1 position. Cleavage in MT-SP1 occurs after position R followed by the sequence VVGG.

[0144] As used herein, target substrate refers to a substrate that is cleaved by a protease. Typically, the target substrate is specifically cleaved at its substrate recognition site by a protease. Minimally, a target substrate includes the amino acids that make up the cleavage sequence. Optionally, a target substrate includes a peptide containing the cleavage sequence and any other amino acids. A full-length protein, allelic variant, isoform, or any portion thereof, containing a cleavage sequence recognized by a protease, is a target substrate for that protease. For example, for purposes herein in which complement inactivation is intended, a target substrate is any one or more, such as for example, 1, 2, 3, 4, 5, 6, 7, 8, 9, 10, 20, 30, 40 or more, complement proteins, or any portion or fragment thereof of a complement protein containing a cleavage sequence recognized by a protease. Such target substrates can be purified proteins, or can be present in a mixture, such as a mixture in vitro or a mixture in vivo. Mixtures can include, for example, blood or serum, or other tissue fluids. Additionally, a target substrate includes a peptide or protein containing an additional moiety that does not affect cleavage of the substrate by a protease. For example, a target substrate can include a four amino acid peptide or a full-length protein chemically linked to a fluorogenic moiety. The proteases can be modified to exhibit greater substrate specificity for a target substrate.

[0145] As used herein, cleavage refers to the breaking of peptide bonds by a protease. The cleavage site motif for a protease involves residues N- and C-terminal to the scissile bond (the unprimed and primed sides, respectively, with the cleavage site for a protease defined as . . . P3-P2-P1-P1′-P2′-P3′ . . . , and cleavage occurs between the P1 and P1′ residues). Typically, cleavage of a substrate is an activating cleavage or an inhibitory cleavage. An activating cleavage refers to cleavage of a polypeptide from an inactive form to an active form. This includes, for example, cleavage of a zymogen to an active enzyme, and/or cleavage of a progrowth factor into an active growth factor. For example, MT-SP1 can auto-activate by cleaving a target substrate at the P1-P4 sequence of RQAR. An activating cleavage also is cleavage whereby a protein is cleaved into one or more proteins that themselves have activity. For example, the complement system is an irreversible cascade of proteolytic cleavage events whose termination results in the formation of multiple effector molecules that stimulate inflammation, facilitate antigen phagocytosis, and lyse some cells directly. Thus, cleavage of C3 by convertase into C3a and C3b is an activation cleavage.

[0146] As used herein, an inhibitory cleavage is cleavage of a protein into one or more degradation products that are not functional. Inhibitory cleavage results in the diminishment or reduction of an activity of a protein. Typically, a reduction of an activity of a protein reduces the pathway or process for which the protein is involved. In one example, the cleavage of any one or more complement proteins that is an inhibitory cleavage results in the concomitant reduction or inhibition of any one or more of the classical, lectin, or alternative functional pathways of complement. To be inhibitory, the cleavage reduces activity by at least about 10%, 20%, 30%, 40%, 50%, 60%, 70%, 80%, 90%, 95%, 99.9% or more compared to a native form of the protein. The percent cleavage of a protein that is required for the cleavage to be inhibitory varies among proteins but can be determined by assaying for an activity of the protein.

[0147] As used herein, reference to a protease that cleaves VEGF or a VEGFR refers to a protease that is modified to cleave VEGF or a VEGFR or that in its native form cleaves VEGF or a VEGFR to thereby reduce or inactivate signaling of the VEGF or VEGFR complex, particularly cell proliferation signaling that can be manifested as a biological effect such as angiogenesis, particular undesired angiogenesis. Cleavage of VEGF or VEGFR by a protease can be determined by assaying for the activity of a VEGF or VEGFR using any method or assay known to one of skill in the art to assess VEGF or VEGFR function.

[0148] As used herein, reference to a protease (modified or unmodified) that does not cleave VEGF or a VEGFR refers to a protease that does not reduce or inactivate signaling of the VEGF or a VEGFR complex. In particular, for purposes herein, the protease has greater substrate specificity or activity to a target substrate (i.e. a complement protein), such as or about 1-fold, 1.5-fold, 2-fold, 5-fold, 10-fold, 20-fold, 50-fold, 100-fold, 200-fold, 300-fold, 400-fold or more, than for a VEGF or a VEGFR protein or a peptide substrate that contains the corresponding cleavage sequence (i.e. RRVR). For purposes herein, comparison of cleavage of a complement protein with a VEGF or VEGFR protein or peptide substrate is under the same reaction conditions as a protease cleaves a complement protein.

[0149] As used herein, the “scaffold” or “protease scaffold” refers to a prototype protease that can be modified to alter its target specificity. Scaffolds include wildtype proteases, allelic variants and isoforms. They can serve as the starting material for modification to produce a protease that has a targeted specificity.

[0150] As used herein, a “modified protease,” or “mutein protease” refers to a protease polypeptide (protein) that has one or more modifications in primary sequence compared to a scaffold protease. The one or more mutations can be one or more amino acid replacements (substitutions), insertions, deletions and any combination thereof. A modified protease polypeptide includes those with 1, 2, 3, 4, 5, 6, 7, 8, 9, 10, 11, 12, 13, 14, 15, 16, 17, 18, 19, 20, or more modified positions. A modified protease can be a full-length scaffold protease, or can be a catalytically active portion thereof of a modified full length scaffold protease as long as the modified protease contains modifications in regions that alter the activity or substrate specificity of the protease and the protease is proteolytically active. Generally, these mutations change the specificity and activity of the scaffold proteases for cleavage of any one or more of the complement proteins. In addition to containing modifications in regions that alter the substrate specificity of a protease, a modified protease also can tolerate other modifications in regions that are non-essential to the substrate specificity of a protease. Hence, a modified protease typically has 60%, 70%, 80%, 85%, 90%, 91%, 92%, 93%, 94%, 95%, 96%, 97%, 98%, 99% or more sequence identity to a corresponding sequence of amino acids of a wildtype or scaffold protease. A modified full-length protease or a catalytically active portion thereof of a modified protease can include proteases that are fusion proteins as long as the fusion itself does not alter substrate specificity of a protease.

[0151] As used herein, chymotrypsin numbering refers to the amino acid numbering of a mature chymotrypsin polypeptide of SEQ ID NO:8. Alignment of a protease domain of another protease, such as for example the protease domain of MT-SP1, can be made with chymotrypsin. In such an instance, the amino acids of MT-SP1 that correspond to amino acids of chymotrypsin are given the numbering of the chymotrypsin amino acids. Corresponding positions can be determined by such alignment by one of skill in the art using manual alignments or by using the numerous alignment programs available (for example, BLASTP). Corresponding positions also can be based on structural alignments, for example by using computer simulated alignments of protein structure. Recitation that amino acids of a polypeptide correspond to amino acids in a disclosed sequence refers to amino acids identified upon alignment of the polypeptide with the disclosed sequence to maximize identity or homology (where conserved amino acids are aligned) using a standard alignment algorithm, such as the GAP algorithm. For example, upon alignment of the serine protease domain of MT-SP1 (SEQ ID NO:10) with mature chymotrypsin, V at position 1 in MT-SP1 is given the chymotrypsin numbering of V16. Subsequent amino acids are numbered accordingly. In one example, an F at amino acid position 708 of full-length MT-SP1 (SEQ ID NO:2) or at position 94 of the protease domain of MT-SP1 (SEQ ID NO:10), corresponds to F99 based on chymotrypsin numbering. Where a residue exists in a protease, but is not present in chymotrypsin, the amino acid residue is given a letter notation. For example, residues in chymotrypsin that are part of a loop with amino acid 60 based on chymotrypsin numbering, but are inserted in the MT-SP1 sequence compared to chymotrypsin, are referred to for example as Asp60b or Arg60c.

[0152] As used herein, “inhibiting complement activation” or “complement inactivation” refers to the reduction or decrease of a complement-mediated function or activity of any one or more of the complement pathways by a protease or in the activity of any of the proteins in a pathway. A function or activity of complement can occur in vitro or in vivo. Exemplary functions of complement that can be assayed and that are described herein include hemolytic assays, and assays to measure any one or more of the complement effector molecules such as by SDS PAGE followed by Western Blot or Coomassie Brilliant Blue staining or by ELISA. A protease can inhibit complement activation by 5%, 10%, 20%, 30%, 40%, 50%, 60%, 70%, 80%, 90% or more. In other embodiments, complement activation is inhibited by a protease by 40%, 50%, 60%, 70%, 80%, 85%, 90%, 95% or 99.9% compared to the activity of complement in the absence of a protease.

[0153] As used herein, specificity for a target substrate refers to a preference for cleavage of a target substrate by a protease compared to a another substrate, referred to as a non-target substrate. Specificity is reflected in the specificity constant (k_{cat}/Kₘ), which is a measure of the affinity of a protease for its substrate and the efficiency of the enzyme.

[0154] As used herein, a specificity constant for cleavage is (k_{cat}/Kₘ), wherein Kₘ is the Michaelis-Menton constant ([S] at one half Vₘₐₓ) and k_{cat} is the Vₘₐₓ/[E_{T}], where E_{T} is the final enzyme concentration. The parameters k_{cat}, Kₘ and k_{cat}/Kₘ can be calculated by graphing the inverse of the substrate concentration versus the inverse of the velocity of substrate cleavage, and fitting to the Lineweaver-Burk equation (1/velocity=(Kₘ/Vₘₐₓ)(1/[S])+1/Vₘₐₓ; where Vₘₐₓ=[E_{T}]k_{cat}). Any method to determine the rate of increase of cleavage over time in the presence of various concentrations of substrate can be used to calculate the specificity constant. For example, a substrate is linked to a fluorogenic moiety, which is released upon cleavage by a protease. By determining the rate of cleavage at different enzyme concentrations, k_{cat} can be determined for a particular protease. The specificity constant can be used to determine the site specific preferences of an amino acid in any one or more of the S1-S4 pockets of a protease for a concomitant P1-P4 amino acid in a substrate using standard methods in the art, such as a positional scanning combinatorial library (PS-SCL). Additionally, the specificity constant also can be used to determine the preference of a protease for one target substrate over another substrate.

[0155] As used herein, substrate specificity refers to the preference of a protease for one target substrate over another. Substrate specificity can be measured as a ration of specificity constants.

[0156] As used herein, a substrate specificity ratio is the ratio of specificity constants and can be used to compare specificities of two or more proteases or a protease for two more substrates. For example, substrate specificity of a protease for competing substrates or of competing proteases for a substrate can be compared by comparing k_{cat}/Kₘ. For example, a protease that has a specificity constant of 2×10⁶ M⁻¹sec⁻¹ for a target substrate and 2×10⁴ M⁻¹sec⁻¹ for a non-target substrate is more specific for the target substrate. Using the specificity constants from above, the protease has a substrate specificity ratio of 100 for the target protease.

[0157] As used herein, preference or substrate specificity for a target substrate can be expressed as a substrate specificity ratio. The particular value of the ratio that reflects a preference is a function of the substrates and proteases at issue. A substrate specificity ratio that is greater than 1 signifies a preference for a target substrate and a substrate specificity less than 1 signifies a preference for a non-target substrate. Generally, a ratio of at least or about 1 reflects a sufficient difference for a protease to be considered a candidate therapeutic.

[0158] As used herein, altered specificity refers to a change in substrate specificity of a modified protease compared to a starting scaffold protease. Generally, the change in specificity is a reflection of the change in preference of a modified protease for a target substrate compared to a wildtype substrate of the scaffold protease (herein referred to as a non-target substrate). Typically, modified proteases provided herein exhibit increased substrate specificity for any one or more of the complement proteins compared to the substrate specificity of a scaffold protease. For example, a modified protease that has a substrate specificity ratio of 100 for a target substrate versus a non-target substrate exhibits a 10-fold increased specificity compared to a scaffold protease with a substrate specificity ratio of 10. In another example, a modified protease that has a substrate specificity ratio of 1 compared to a ratio of 0.1, exhibits a 10-fold increase in substrate specificity. To exhibit increased specificity compared to a scaffold protease, a modified protease has a 1.5-fold, 2-fold, 5-fold, 10-fold, 50-fold, 100-fold, 200-fold, 300-fold, 400-fold, 500-fold or more greater substrate specificity for any one of more of the complement proteins.

[0159] As used herein, “selectivity” can be used interchangeably with specificity when referring to the ability of a protease to choose and cleave one target substrate from among a mixture of competing substrates. Increased selectivity of a protease for a target substrate compared to any other one or more target substrates can be determined, for example, by comparing the specificity constants of cleavage of the target substrates by a protease. For example, if a protease has a specificity constant of cleavage of 2×10⁶ M⁻¹sec⁻¹ for a target substrate and 2×10⁴ M⁻¹sec⁻¹ for any other one of more substrates, the protease is more selective for the former target substrate.

[0160] As used herein, activity refers to a functional activity or activities of a polypeptide or portion thereof associated with a full-length (complete) protein. Functional activities include, but are not limited to, biological activity, catalytic or enzymatic activity, antigenicity (ability to bind to or compete with a polypeptide for binding to an anti-polypeptide antibody), immunogenicity, ability to form multimers, and the ability to specifically bind to a receptor or ligand for the polypeptide.

[0161] As used herein, a functional activity with reference to a complement protein refers to a complement-mediated function including, but not limited to, anaphylaxis, opsonization, chemotaxis, or cell lysis. Nonlimiting assays for testing activities of complement include hemolysis of red blood cells, and detection of complement effector molecules such as by ELISA or SDS-PAGE.

[0162] As used herein, catalytic activity or cleavage activity refers to the activity of a protease as assessed in in vitro proteolytic assays that detect proteolysis of a selected substrate. Cleavage activity can be measured by assessing catalytic efficiency of a protease.

[0163] As used herein, activity towards a target substrate refers to cleavage activity and/or functional activity, or other measurement that reflects the activity of a protease on or towards a target substrate. A functional activity of a complement protein target substrate by a protease can be measured by assessing an IC50 in a complement assay such as red blood cell lysis, or other such assays known by one of skill in the art or provided herein to assess complement activity. Cleavage activity can be measured by assessing catalytic efficiency of a protease. For purposes herein, an activity is increased if a protease exhibits greater proteolysis or cleavage of a target substrate and/or modulates (i.e. activates or inhibits) a functional activity of a complement protein as compared to in the absence of the protease.

[0164] As used herein, serine proteases or serine endopeptidases refers to a class of peptidases, which are characterized by the presence of a serine residue in the active center of the enzyme. Serine proteases participate in a wide range of functions in the body, including blood clotting and inflammation, as well as functioning as digestive enzymes in prokaryotes and eukaryotes. The mechanism of cleavage by serine proteases is based on nucleophilic attack of a targeted peptidic bond by a serine. Cysteine, threonine or water molecules associated with aspartate or metals also can play this role. Aligned side chains of serine, histidine and aspartate form a catalytic triad common to most serine proteases. The active site of serine proteases is shaped as a cleft where the polypeptide substrate binds.

[0165] As used herein, a complement protease refers to a protease that is involved in the generation and amplification of complement cascade reactions in any of the complement pathways. These proteases include the serine protease factor I, factor D, MBL-associated serine protease (MASP)-2, MASP-1, C1s, C1r, factor B, C2, and the convertases and any other protease that occurs in a complement pathway whereby complement activation is effected. In particular, complement proteases are any unmodified complement proteases, including factor I, factor D, MASP-2, MASP-1, C1s, C1r, factor B and C2.

[0166] As used herein, a non-complement protease is any protease that is not normally part of any one or more of the complement pathways.

[0167] As used herein, MT-SP1 refers to a serine protease that is part of the S1 peptidase family of serine proteases (also containing trypsin and chymotrypsin) based on the location of the Ser, His, and Lys active site residues. MT-SP1 is characterized by a transmembrane domain, two CUB domains, four LDLR repeats, and a serine protease domain (or peptidase S1 domain) that is highly conserved among all members of the peptidase S1 family of serine proteases, such as for example with chymotrypsin. The sequence of an exemplary MT-SP1 is set forth in SEQ ID NO: 2. The protease domain occurs between and includes amino acids 615-854.

[0168] Reference to an MT-SP1 protease includes a full-length MT-SP1 or any catalytically active portion thereof and includes allelic variants and species variants and variants encoded by splice variants. An MT-SP1 protease occurs as a single chain zymogen, and as an activated two-chain polypeptide. Reference to MT-SP1 includes active single-chain and two-chain forms thereof. Of particular interest are MT-SP1 proteases of mammalian, including human, origin. An MT-SP1 protease also can include those of rat or mouse origin. Those of skill in this art recognize that, in general, single amino acid substitutions in non-essential regions of a polypeptide do not substantially alter biological activity (see, e.g., Watson et al. Molecular Biology of the Gene, 4th Edition, 1987, The Benjamin/Cummings Pub. co., p. 224). Sequences of encoding nucleic molecules and the encoded amino acid sequences of exemplary MT-SP1 proteases of human origin and/or catalytically active domains thereof are set forth in SEQ ID NOS: 1, 2, 9 and 10. Exemplary MT-SP1 polypeptides of non-human origin are those having amino acid sequences such as in mice (Mus musculus, SEQ ID NO: 449) and rats (Rattus norvegicus, SEQ ID NO: 450). Herein, an MT-SP1 protease can be a scaffold MT-SP1.

[0169] As used herein, reference to a “catalytically active portion thereof” of an MT-SP1 protease refers to the protease domain, or any fragment or portion thereof that retains protease activity. For example, a catalytically active portion of an MT-SP1 can be an MT-SP1 protease domain including an isolated single chain form of the protease domain or an activated two-chain form.

[0170] As used herein, a modified MT-SP1 protease refers to a protease that exhibits altered activity, such as altered substrate specificity, compared to the scaffold or unmodified form. Such proteases include 1, 2, 3, 4, 5, 6, 7, 8, 9, 10, 11, 12, 13, 14, 15, 16, 17, 18, 19, 20, or more modifications (i.e. changes in amino acids) compared to a scaffold MT-SP1 such that an activity, such as substrate specificity or selectivity, of the MT-SP1 protease for cleaving a complement protein is altered. A modified MT-SP1 can be a full-length scaffold MT-SP1, or can be a portion thereof of a full length scaffold protease, as long as the modified protease contains modifications in regions that alter the activity or substrate specificity of the protease and the protease is proteolytically active. A modified MT-SP1 protease also can include other modifications in regions that do not impact on substrate specificity of the protease. Hence, a modified MT-SP1 protease typically has 60%, 70%, 80%, 85%, 90%, 91%, 92%, 93%, 94%, 95%, 96%, 97%, 98%, 99% or more sequence identity to a corresponding sequence of amino acids of a wildtype or scaffold MT-SP1. A modified full-length MT-SP1 protease or a catalytically active portion thereof of a modified MT-SP1 can include proteases that are fusion proteins as long as the fusion protein possesses the target specificity.

[0171] As used herein, a human protein is one encoded by a nucleic acid molecule, such as DNA, present in the genome of a human, including all allelic variants and conservative variations thereof. A variant or modification of a protein is a human protein if the modification is based on the wildtype or prominent sequence of a human protein.

[0172] As used herein, the residues of naturally occurring α-amino acids are the residues of those 20 α-amino acids found in nature which are incorporated into protein by the specific recognition of the charged tRNA molecule with its cognate mRNA codon in humans.

[0173] As used herein, non-naturally occurring amino acids refer to amino acids that are not genetically encoded.

[0174] As used herein, nucleic acids include DNA, RNA and analogs thereof, including peptide nucleic acids (PNA) and mixtures thereof. Nucleic acids can be single or double-stranded. When referring to probes or primers, which are optionally labeled, such as with a detectable label, such as a fluorescent or radiolabel, single-stranded molecules are contemplated. Such molecules are typically of a length such that their target is statistically unique or of low copy number (typically less than 5, generally less than 3) for probing or priming a library. Generally a probe or primer contains at least 14, 16 or 30 contiguous nucleotides of sequence complementary to or identical to a gene of interest. Probes and primers can be 10, 20, 30, 50, 100 or more nucleic acids long.

[0175] As used herein, a peptide refers to a polypeptide that is from 2 to 40 amino acids in length.

[0176] As used herein, the amino acids which occur in the various sequences of amino acids provided herein are identified according to their known, three-letter or one-letter abbreviations (Table 1). The nucleotides which occur in the various nucleic acid fragments are designated with the standard single-letter designations used routinely in the art.

[0177] As used herein, an “amino acid” is an organic compound containing an amino group and a carboxylic acid group. A polypeptide contains two or more amino acids. For purposes herein, amino acids include the twenty naturally-occurring amino acids, non-natural amino acids and amino acid analogs (i.e., amino acids wherein the α-carbon has a side chain).

[0178] As used herein, the “amino acids,” which occur in the various amino acid sequences appearing herein, are identified according to their well-known, three-letter or one-letter abbreviations (see Table 1). The nucleotides, which occur in the various DNA fragments, are designated with the standard single-letter designations used routinely in the art.

[0179] As used herein, “amino acid residue” refers to an amino acid formed upon chemical digestion (hydrolysis) of a polypeptide at its peptide linkages. The amino acid residues described herein are presumed to be in the “L” isomeric form. Residues in the “D” isomeric form, which are so designated, can be substituted for any L-amino acid residue as long as the desired functional property is retained by the polypeptide. NH₂ refers to the free amino group present at the amino terminus of a polypeptide. COOH refers to the free carboxy group present at the carboxyl terminus of a polypeptide. In keeping with standard polypeptide nomenclature described in J. Biol. Chem., 243: 3552-3559 (1969), and adopted 37 C.F.R. §§ 1.821-1.822, abbreviations for amino acid residues are shown in Table 1:

TABLE 1
Table of Correspondence

SYMBOL

| 1-Letter | 3-Letter | AMINO ACID |
|---|---|---|
| Y | Tyr | Tyrosine |
| G | Gly | Glycine |
| F | Phe | Phenylalanine |
| M | Met | Methionine |
| A | Ala | Alanine |
| S | Ser | Serine |
| I | Ile | Isoleucine |
| L | Leu | Leucine |
| T | Thr | Threonine |
| V | Val | Valine |
| P | Pro | proline |
| K | Lys | Lysine |
| H | His | Histidine |
| Q | Gln | Glutamine |
| E | Glu | glutamic acid |
| Z | Glx | Glu and/or Gln |
| W | Trp | Tryptophan |
| R | Arg | Arginine |
| D | Asp | aspartic acid |
| N | Asn | asparagines |
| B | Asx | Asn and/or Asp |
| C | Cys | Cysteine |
| X | Xaa | Unknown or other |

[0180] It should be noted that all amino acid residue sequences represented herein by formulae have a left to right orientation in the conventional direction of amino-terminus to carboxyl-terminus. In addition, the phrase “amino acid residue” is broadly defined to include the amino acids listed in the Table of Correspondence (Table 1) and modified and unusual amino acids, such as those referred to in 37 C.F.R. §§ 1.821-1.822, and incorporated herein by reference. Furthermore, it should be noted that a dash at the beginning or end of an amino acid residue sequence indicates a peptide bond to a further sequence of one or more amino acid residues, to an amino-terminal group such as NH₂ or to a carboxyl-terminal group such as COOH.

[0181] As used herein, “naturally occurring amino acids” refer to the 20 L-amino acids that occur in polypeptides.

[0182] As used herein, “non-natural amino acid” refers to an organic compound that has a structure similar to a natural amino acid but has been modified structurally to mimic the structure and reactivity of a natural amino acid. Non-naturally occurring amino acids thus include, for example, amino acids or analogs of amino acids other than the 20 naturally-occurring amino acids and include, but are not limited to, the D-isostereomers of amino acids. Exemplary non-natural amino acids are described herein and are known to those of skill in the art.

[0183] As used herein, an isokinetic mixture is one in which the molar ratios of amino acids has been adjusted based on their reported reaction rates (see, e.g., Ostresh et al., (1994) Biopolymers 34:1681).

[0184] As used herein, a DNA construct is a single or double stranded, linear or circular DNA molecule that contains segments of DNA combined and juxtaposed in a manner not found in nature. DNA constructs exist as a result of human manipulation, and include clones and other copies of manipulated molecules.

[0185] As used herein, a DNA segment is a portion of a larger DNA molecule having specified attributes. For example, a DNA segment encoding a specified polypeptide is a portion of a longer DNA molecule, such as a plasmid or plasmid fragment, which, when read from the 5′ to 3′ direction, encodes the sequence of amino acids of the specified polypeptide.

[0186] As used herein, the term ortholog means a polypeptide or protein obtained from one species that is the functional counterpart of a polypeptide or protein from a different species. Sequence differences among orthologs are the result of speciation.

[0187] As used herein, the term polynucleotide means a single- or double-stranded polymer of deoxyribonucleotides or ribonucleotide bases read from the 5′ to the 3′ end. Polynucleotides include RNA and DNA, and can be isolated from natural sources, synthesized in vitro, or prepared from a combination of natural and synthetic molecules. The length of a polynucleotide molecule is given herein in terms of nucleotides (abbreviated “nt”) or base pairs (abbreviated “bp”). The term nucleotides is used for single- and double-stranded molecules where the context permits. When the term is applied to double-stranded molecules it is used to denote overall length and will be understood to be equivalent to the term base pairs. It will be recognized by those skilled in the art that the two strands of a double-stranded polynucleotide can differ slightly in length and that the ends thereof can be staggered; thus all nucleotides within a double-stranded polynucleotide molecule can not be paired. Such unpaired ends will, in general, not exceed 20 nucleotides in length.

[0188] As used herein, a protease polypeptide is a polypeptide having an amino acid sequence corresponding to any one of the scaffold or modified proteases described herein.

[0189] As used herein, “similarity” between two proteins or nucleic acids refers to the relatedness between the sequence of amino acids of the proteins or the nucleotide sequences of the nucleic acids. Similarity can be based on the degree of identity and/or homology of sequences of residues and the residues contained therein. Methods for assessing the degree of similarity between proteins or nucleic acids are known to those of skill in the art. For example, in one method of assessing sequence similarity, two amino acid or nucleotide sequences are aligned in a manner that yields a maximal level of identity between the sequences. “Identity” refers to the extent to which the amino acid or nucleotide sequences are invariant. Alignment of amino acid sequences, and to some extent nucleotide sequences, also can take into account conservative differences and/or frequent substitutions in amino acids (or nucleotides). Conservative differences are those that preserve the physico-chemical properties of the residues involved. Alignments can be global (alignment of the compared sequences over the entire length of the sequences and including all residues) or local (the alignment of a portion of the sequences that includes only the most similar region or regions).

[0190] “Identity” per se has an art-recognized meaning and can be calculated using published techniques. (See, e.g.: Computational Molecular Biology, Lesk, A. M., ed., Oxford University Press, New York, 1988; Biocomputing: Informatics and Genome Projects, Smith, D. W., ed., Academic Press, New York, 1993; Computer Analysis of Sequence Data, Part I, Griffin, A. M., and Griffin, H. G., eds., Humana Press, New Jersey, 1994; Sequence Analysis in Molecular Biology, von Heinje, G., Academic Press, 1987; and Sequence Analysis Primer, Gribskov, M. and Devereux, J., eds., M Stockton Press, New York, 1991). While there exist a number of methods to measure identity between two polynucleotide or polypeptides, the term “identity” is well known to skilled artisans (Carrillo, H. & Lipman, D., SIAM J Applied Math 48:1073 (1988)).

[0191] As used herein, by homologous (with respect to nucleic acid and/or amino acid sequences) means about greater than or equal to 25% sequence homology, typically greater than or equal to 25%, 40%, 60%, 70%, 80%, 85%, 90% or 95% sequence homology; the precise percentage can be specified if necessary. For purposes herein the terms “homology” and “identity” are often used interchangeably, unless otherwise indicated. In general, for determination of the percentage homology or identity, sequences are aligned so that the highest order match is obtained (see, e.g.: Computational Molecular Biology, Lesk, A. M., ed., Oxford University Press, New York, 1988; Biocomputing: Informatics and Genome Projects, Smith, D. W., ed., Academic Press, New York, 1993; Computer Analysis of Sequence Data, Part I, Griffin, A. M., and Griffin, H. G., eds., Humana Press, New Jersey, 1994; Sequence Analysis in Molecular Biology, von Heinje, G., Academic Press, 1987; and Sequence Analysis Primer, Gribskov, M. and Devereux, J., eds., M Stockton Press, New York, 1991; Carrillo et al. (1988) SIAM J Applied Math 48:1073). By sequence homology, the number of conserved amino acids is determined by standard alignment algorithm programs, and can be used with default gap penalties established by each supplier. Substantially homologous nucleic acid molecules would hybridize typically at moderate stringency or at high stringency all along the length of the nucleic acid of interest. Also contemplated are nucleic acid molecules that contain degenerate codons in place of codons in the hybridizing nucleic acid molecule.

[0192] Whether any two molecules have nucleotide sequences or amino acid sequences that are at least 60%, 70%, 80%, 85%, 90%, 95%, 96%, 97%, 98% or 99% “identical” or “homologous” can be determined using known computer algorithms such as the “FASTA” program, using for example, the default parameters as in Pearson et al. (1988) Proc. Natl. Acad. Sci. USA 85:2444 (other programs include the GCG program package (Devereux, J., et al., Nucleic Acids Research 12(I):387 (1984)), BLASTP, BLASTN, FASTA (Altschul, S. F., et al., J Molec Biol 215:403 (1990); Guide to Huge Computers, Martin J. Bishop, ed., Academic Press, San Diego, 1994, and Carrillo et al. (1988) SIAM J Applied Math 48:1073). For example, the BLAST function of the National Center for Biotechnology Information database can be used to determine identity. Other commercially or publicly available programs include the DNAStar “MegAlign” program (Madison, Wis.) and the University of Wisconsin Genetics Computer Group (UWG) “Gap” program (Madison Wis.)). Percent homology or identity of proteins and/or nucleic acid molecules can be determined, for example, by comparing sequence information using a GAP computer program (e.g., Needleman et al. (1970) J. Mol. Biol. 48:443, as revised by Smith and Waterman (1981) Adv. Appl. Math. 2:482). Briefly, the GAP program defines similarity as the number of aligned symbols (i.e., nucleotides or amino acids), which are similar, divided by the total number of symbols in the shorter of the two sequences. Default parameters for the GAP program can include: (1) a unary comparison matrix (containing a value of 1 for identities and 0 for non-identities) and the weighted comparison matrix of Gribskov et al. (1986) Nucl. Acids Res. 14:6745, as described by Schwartz and Dayhoff, eds., ATLAS OF PROTEIN SEQUENCE AND STRUCTURE, National Biomedical Research Foundation, pp. 353-358 (1979); (2) a penalty of 3.0 for each gap and an additional 0.10 penalty for each symbol in each gap; and (3) no penalty for end gaps.

[0193] Therefore, as used herein, the term “identity” or “homology” represents a comparison between a test and a reference polypeptide or polynucleotide. As used herein, the term “at least 90% identical to” refers to percent identities from 90 to 99.99 relative to the reference nucleic acid or amino acid sequence of the polypeptide. Identity at a level of 90% or more is indicative of the fact that, assuming for exemplification purposes a test and reference polypeptide length of 100 amino acids are compared, no more than 10% (i.e., 10 out of 100) of the amino acids in the test polypeptide differs from that of the reference polypeptide. Similar comparisons can be made between test and reference polynucleotides. Such differences can be represented as point mutations randomly distributed over the entire length of a polypeptide or they can be clustered in one or more locations of varying length up to the maximum allowable, e.g. 10/100 amino acid difference (approximately 90% identity). Differences are defined as nucleic acid or amino acid substitutions, insertions or deletions. At the level of homologies or identities above about 85-90%, the result should be independent of the program and gap parameters set; such high levels of identity can be assessed readily, often by manual alignment without relying on software.

[0194] As used herein, an aligned sequence refers to the use of homology (similarity and/or identity) to align corresponding positions in a sequence of nucleotides or amino acids. Typically, two or more sequences that are related by 50% or more identity are aligned. An aligned set of sequences refers to 2 or more sequences that are aligned at corresponding positions and can include aligning sequences derived from RNAs, such as ESTs and other cDNAs, aligned with genomic DNA sequence.

[0195] As used herein, “primer” refers to a nucleic acid molecule that can act as a point of initiation of template-directed DNA synthesis under appropriate conditions (e.g., in the presence of four different nucleoside triphosphates and a polymerization agent, such as DNA polymerase, RNA polymerase or reverse transcriptase) in an appropriate buffer and at a suitable temperature. It will be appreciated that certain nucleic acid molecules can serve as a “probe” and as a “primer.” A primer, however, has a 3′ hydroxyl group for extension. A primer can be used in a variety of methods, including, for example, polymerase chain reaction (PCR), reverse-transcriptase (RT)-PCR, RNA PCR, LCR, multiplex PCR, panhandle PCR, capture PCR, expression PCR, 3′ and 5′ RACE, in situ PCR, ligation-mediated PCR and other amplification protocols.

[0196] As used herein, “primer pair” refers to a set of primers that includes a 5′ (upstream) primer that hybridizes with the 5′ end of a sequence to be amplified (e.g. by PCR) and a 3′ (downstream) primer that hybridizes with the complement of the 3′ end of the sequence to be amplified.

[0197] As used herein, “specifically hybridizes” refers to annealing, by complementary base-pairing, of a nucleic acid molecule (e.g. an oligonucleotide) to a target nucleic acid molecule. Those of skill in the art are familiar with in vitro and in vivo parameters that affect specific hybridization, such as length and composition of the particular molecule. Parameters particularly relevant to in vitro hybridization further include annealing and washing temperature, buffer composition and salt concentration. Exemplary washing conditions for removing non-specifically bound nucleic acid molecules at high stringency are 0.1×SSPE, 0.1% SDS, 65° C., and at medium stringency are 0.2×SSPE, 0.1% SDS, 50° C. Equivalent stringency conditions are known in the art. The skilled person can readily adjust these parameters to achieve specific hybridization of a nucleic acid molecule to a target nucleic acid molecule appropriate for a particular application.

[0198] As used herein, substantially identical to a product means sufficiently similar so that the property of interest is sufficiently unchanged so that the substantially identical product can be used in place of the product.

[0199] As used herein, it also is understood that the terms “substantially identical” or “similar” varies with the context as understood by those skilled in the relevant art.

[0200] As used herein, an allelic variant or allelic variation references any of two or more alternative forms of a gene occupying the same chromosomal locus. Allelic variation arises naturally through mutation, and can result in phenotypic polymorphism within populations. Gene mutations can be silent (no change in the encoded polypeptide) or can encode polypeptides having altered amino acid sequence. The term “allelic variant” also is used herein to denote a protein encoded by an allelic variant of a gene. Typically the reference form of the gene encodes a wildtype form and/or predominant form of a polypeptide from a population or single reference member of a species. Typically, allelic variants, which include variants between and among species, have at least 80%, 90% or greater amino acid identity with a wildtype and/or predominant form from the same species; the degree of identity depends upon the gene and whether comparison is interspecies or intraspecies. Generally, intraspecies allelic variants have at least about 80%, 85%, 90% or 95% identity or greater with a wildtype and/or predominant form, including 96%, 97%, 98%, 99% or greater identity with a wildtype and/or predominant form of a polypeptide.

[0201] As used herein, “allele,” which is used interchangeably herein with “allelic variant” refers to alternative forms of a gene or portions thereof. Alleles occupy the same locus or position on homologous chromosomes. When a subject has two identical alleles of a gene, the subject is said to be homozygous for that gene or allele. When a subject has two different alleles of a gene, the subject is said to be heterozygous for the gene. Alleles of a specific gene can differ from each other in a single nucleotide or several nucleotides, and can include substitutions, deletions and insertions of nucleotides. An allele of a gene also can be a form of a gene containing a mutation.

[0202] As used herein, a splice variant refers to a variant produced by differential processing of a primary transcript of genomic DNA that results in more than one type of mRNA.

[0203] As used herein, modification is in reference to modification of a sequence of amino acids of a polypeptide or a sequence of nucleotides in a nucleic acid molecule and includes deletions, insertions, and replacements of amino acids and nucleotides, respectively.

[0204] For purposes herein, amino acid substitutions, deletions and/or insertions, can be made in any of the proteases and protease domains thereof provided that the resulting protein exhibits protease activity or other activity (or, if desired, such changes can be made to eliminate activity). Modifications can be made by making conservative amino acid substitutions and also non-conservative amino acid substitutions. For example, amino acid substitutions that desirably or advantageously alter properties of the proteins can be made. In one embodiment, mutations that prevent degradation of the polypeptide can be made. Many proteases cleave after basic residues, such as R and K; to eliminate such cleavage, the basic residue is replaced with a non-basic residue. Interaction of the protease with an inhibitor can be blocked while retaining catalytic activity by effecting a non-conservative change at the site of interaction of the inhibitor with the protease. Other activities also can be altered. For example, receptor binding can be altered without altering catalytic activity.

[0205] Amino acid substitutions contemplated include conservative substitutions, such as those set forth in Table 2, which do not eliminate proteolytic activity. As described herein, substitutions that alter properties of the proteins, such as removal of cleavage sites and other such sites also are contemplated; such substitutions are generally non-conservative, but can be readily effected by those of skill in the art.

[0206] Suitable conservative substitutions of amino acids are known to those of skill in this art and can be made generally without altering the biological activity, for example enzymatic activity, of the resulting molecule. Those of skill in this art recognize that, in general, single amino acid substitutions in non-essential regions of a polypeptide do not substantially alter biological activity (see, e.g., Watson et al. Molecular Biology of the Gene, 4th Edition, 1987, The Benjamin/Cummings Pub. co., p. 224). Also included within the definition, is the catalytically active fragment of a serine protease, particularly a single chain protease portion. Conservative amino acid substitutions are made, for example, in accordance with those set forth in TABLE 2 as follows:

TABLE 2

| Original residue | Conservative substitution |
|---|---|
| Ala (A) | Gly; Ser; Abu |
| Arg (R) | Lys; orn |
| Asn (N) | Gln; His |
| Cys (C) | Ser |
| Gln (Q) | Asn |
| Glu (E) | Asp |
| Gly (G) | Ala; Pro |
| His (H) | Asn; Gln |
| Ile (I) | Leu; Val |
| Leu (L) | Ile; Val |
| Lys (K) | Arg; Gln; Glu |
| Met (M) | Leu; Tyr; Ile |
| Ornithine | Lys; Arg |
| Phe (F) | Met; Leu; Tyr |
| Ser (S) | Thr |
| Thr (T) | Ser |
| Trp (W) | Tyr |
| Tyr (Y) | Trp; Phe |
| Val (V) | Ile; Leu; Met |

[0207] Other substitutions also are permissible and can be determined empirically or in accord with known conservative substitutions.

[0208] As used herein, the term promoter means a portion of a gene containing DNA sequences that provide for the binding of RNA polymerase and initiation of transcription. Promoter sequences are commonly, but not always, found in the 5′ non-coding region of genes.

[0209] As used herein, isolated or purified polypeptide or protein or biologically-active portion thereof is substantially free of cellular material or other contaminating proteins from the cell of tissue from which the protein is derived, or substantially free from chemical precursors or other chemicals when chemically synthesized. Preparations can be determined to be substantially free if they appear free of readily detectable impurities as determined by standard methods of analysis, such as thin layer chromatography (TLC), gel electrophoresis and high performance liquid chromatography (HPLC), used by those of skill in the art to assess such purity, or sufficiently pure such that further purification would not detectably alter the physical and chemical properties, such as enzymatic and biological activities, of the substance. Methods for purification of the compounds to produce substantially chemically pure compounds are known to those of skill in the art. A substantially chemically pure compound, however, can be a mixture of stereoisomers. In such instances, further purification might increase the specific activity of the compound.

[0210] The term substantially free of cellular material includes preparations of proteins in which the protein is separated from cellular components of the cells from which it is isolated or recombinantly-produced. In one embodiment, the term substantially free of cellular material includes preparations of protease proteins having less that about 30% (by dry weight) of non-protease proteins (also referred to herein as a contaminating protein), generally less than about 20% of non-protease proteins or 10% of non-protease proteins or less that about 5% of non-protease proteins. When the protease protein or active portion thereof is recombinantly produced, it also is substantially free of culture medium, i.e., culture medium represents less than, about, or equal to 20%, 10% or 5% of the volume of the protease protein preparation.

[0211] As used herein, the term substantially free of chemical precursors or other chemicals includes preparations of protease proteins in which the protein is separated from chemical precursors or other chemicals that are involved in the synthesis of the protein. The term includes preparations of protease proteins having less than about 30% (by dry weight), 20%, 10%, 5% or less of chemical precursors or non-protease chemicals or components.

[0212] As used herein, production by recombinant means by using recombinant DNA methods refers to the use of the well known methods of molecular biology for expressing proteins encoded by cloned DNA.

[0213] As used herein, vector (or plasmid) refers to discrete elements that are used to introduce heterologous nucleic acid into cells for either expression or replication thereof. The vectors typically remain episomal, but can be designed to effect integration of a gene or portion thereof into a chromosome of the genome. Also contemplated are vectors that are artificial chromosomes, such as yeast artificial chromosomes and mammalian artificial chromosomes. Selection and use of such vehicles are well known to those of skill in the art.

[0214] As used herein, an expression vector includes vectors capable of expressing DNA that is operatively linked with regulatory sequences, such as promoter regions, that are capable of effecting expression of such DNA fragments. Such additional segments can include promoter and terminator sequences, and optionally can include one or more origins of replication, one or more selectable markers, an enhancer, a polyadenylation signal, and the like. Expression vectors are generally derived from plasmid or viral DNA, or can contain elements of both. Thus, an expression vector refers to a recombinant DNA or RNA construct, such as a plasmid, a phage, recombinant virus or other vector that, upon introduction into an appropriate host cell, results in expression of the cloned DNA. Appropriate expression vectors are well known to those of skill in the art and include those that are replicable in eukaryotic cells and/or prokaryotic cells and those that remain episomal or those which integrate into the host cell genome.

[0215] As used herein, vector also includes “virus vectors” or “viral vectors.” Viral vectors are engineered viruses that are operatively linked to exogenous genes to transfer (as vehicles or shuttles) the exogenous genes into cells.

[0216] As used herein, an adenovirus refers to any of a group of DNA-containing viruses that cause conjunctivitis and upper respiratory tract infections in humans. As used herein, naked DNA refers to histone-free DNA that can be used for vaccines and gene therapy. Naked DNA is the genetic material that is passed from cell to cell during a gene transfer processed called transformation. In transformation, purified or naked DNA is taken up by the recipient cell which will give the recipient cell a new characteristic or phenotype.

[0217] As used herein, operably or operatively linked when referring to DNA segments means that the segments are arranged so that they function in concert for their intended purposes, e.g., transcription initiates in the promoter and proceeds through the coding segment to the terminator.

[0218] As used herein, protein binding sequence refers to a protein or peptide sequence that is capable of specific binding to other protein or peptide sequences generally, to a set of protein or peptide sequences or to a particular protein or peptide sequence.

[0219] As used herein, epitope tag refers to a short stretch of amino acid residues corresponding to an epitope to facilitate subsequent biochemical and immunological analysis of the epitope tagged protein or peptide. Epitope tagging is achieved by adding the sequence of the epitope tag to a protein-encoding sequence in an appropriate expression vector. Epitope tagged proteins can be affinity purified using highly specific antibodies raised against the tags.

[0220] As used herein, metal binding sequence refers to a protein or peptide sequence that is capable of specific binding to metal ions generally, to a set of metal ions or to a particular metal ion.

[0221] As used herein the term assessing is intended to include quantitative and qualitative determination in the sense of obtaining an absolute value for the activity of a protease, or a domain thereof, present in the sample, and also of obtaining an index, ratio, percentage, visual or other value indicative of the level of the activity. Assessment can be direct or indirect and the chemical species actually detected need not of course be the proteolysis product itself but can for example be a derivative thereof or some further substance. For example, detection of a cleavage product of a complement protein, such as by SDS-PAGE and protein staining with Coomassie blue.

[0222] As used herein, biological activity refers to the in vivo activities of a compound or physiological responses that result upon in vivo administration of a compound, composition or other mixture. Biological activity, thus, encompasses therapeutic effects and pharmaceutical activity of such compounds, compositions and mixtures. Biological activities can be observed in in vitro systems designed to test or use such activities. Thus, for purposes herein a biological activity of a protease is its catalytic activity in which a polypeptide is hydrolyzed.

[0223] As used herein equivalent, when referring to two sequences of nucleic acids, means that the two sequences in question encode the same sequence of amino acids or equivalent proteins. When equivalent is used in referring to two proteins or peptides, it means that the two proteins or peptides have substantially the same amino acid sequence with only amino acid substitutions (such as, but not limited to, conservative changes such as those set forth in Table 2, above) that do not substantially alter the activity or function of the protein or peptide. When equivalent refers to a property, the property does not need to be present to the same extent (e.g., two peptides can exhibit different rates of the same type of enzymatic activity), but the activities are usually substantially the same. Complementary, when referring to two nucleotide sequences, means that the two sequences of nucleotides are capable of hybridizing, typically with less than 25%, 15% or 5% mismatches between opposed nucleotides. If necessary, the percentage of complementarity will be specified. Typically the two molecules are selected such that they will hybridize under conditions of high stringency.

[0224] As used herein, an agent that modulates the activity of a protein or expression of a gene or nucleic acid either decreases or increases or otherwise alters the activity of the protein or, in some manner, up- or down-regulates or otherwise alters expression of the nucleic acid in a cell.

[0225] As used herein, a “chimeric protein” or “fusion protein” protease refers to a polypeptide operatively-linked to a different polypeptide. A chimeric or fusion protein provided herein can include one or more proteases or a portion thereof, such as single chain protease domains thereof, and one or more other polypeptides for any one or more of a transcriptional/translational control signals, signal sequences, a tag for localization, a tag for purification, part of a domain of an immunoglobulin G, and/or a targeting agent. These chimeric or fusion proteins include those produced by recombinant means as fusion proteins, those produced by chemical means, such as by chemical coupling, through, for example, coupling to sulfhydryl groups, and those produced by any other method whereby at least one protease, or a portion thereof, is linked, directly or indirectly via linker(s) to another polypeptide.

[0226] As used herein, operatively-linked when referring to a fusion protein refers to a protease polypeptide and a non-protease polypeptide that are fused in-frame to one another. The non-protease polypeptide can be fused to the N-terminus or C-terminus of the protease polypeptide.

[0227] As used herein, a targeting agent, is any moiety, such as a protein or effective portion thereof, that provides specific binding of the conjugate to a cell surface receptor, which in some instances can internalize bound conjugates or portions thereof. A targeting agent also can be one that promotes or facilitates, for example, affinity isolation or purification of the conjugate; attachment of the conjugate to a surface; or detection of the conjugate or complexes containing the conjugate.

[0228] As used herein, an antibody conjugate refers to a conjugate in which the targeting agent is an antibody.

[0229] As used herein, derivative or analog of a molecule refers to a portion derived from or a modified version of the molecule.

[0230] As used herein, “disease or disorder” refers to a pathological condition in an organism resulting from cause or condition including, but not limited to, infections, acquired conditions, genetic conditions, and characterized by identifiable symptoms. Diseases and disorders of interest herein are those involving complement activation, including those mediated by complement activation and those in which complement activation plays a role in the etiology or pathology. Diseases and disorders also include those that are caused by the absence of a protein such as an immune deficiency, and of interest herein are those disorders where complement activation does not occur due to a deficiency in a complement protein.

[0231] As used herein, a complement-mediated disorder is any disorder in which any one or more of the complement proteins plays a role in the disease, either due to an absence or presence of the protein. A complement-mediated disorder is one that is due to a deficiency in a complement protein. A complement-mediated disorder also is one that is due to the presence of any one or more of the complement proteins and the continued activation of the complement pathway.

[0232] As used herein, “treating” a subject with a disease or condition means that the subject's symptoms are partially or totally alleviated, or remain static following treatment. Hence treatment encompasses prophylaxis, therapy and/or cure. Prophylaxis refers to prevention of a potential disease and/or a prevention of worsening of symptoms or progression of a disease. Treatment also encompasses any pharmaceutical use of a modified interferon and compositions provided herein.

[0233] As used herein, a therapeutic agent, therapeutic regimen, radioprotectant, or chemotherapeutic mean conventional drugs and drug therapies, including vaccines, which are known to those skilled in the art. Radiotherapeutic agents are well known in the art.

[0234] As used herein, treatment means any manner in which the symptoms of a condition, disorder or disease are ameliorated or otherwise beneficially altered. Treatment also encompasses any pharmaceutical use of the compositions herein.

[0235] As used herein, amelioration of the symptoms of a particular disease or disorder by a treatment, such as by administration of a pharmaceutical composition or other therapeutic, refers to any lessening, whether permanent or temporary, lasting or transient, of the symptoms that can be attributed to or associated with administration of the composition or therapeutic.

[0236] As used herein, prevention or prophylaxis refers to methods in which the risk of developing disease or condition is reduced.

[0237] As used herein an effective amount of a compound or composition for treating a particular disease is an amount that is sufficient to ameliorate, or in some manner reduce the symptoms associated with the disease. Such amount can be administered as a single dosage or can be administered according to a regimen, whereby it is effective. The amount can cure the disease but, typically, is administered in order to ameliorate the symptoms of the disease. Typically, repeated administration is required to achieve a desired amelioration of symptoms.

[0238] As used herein, “therapeutically effective amount” or “therapeutically effective dose” refers to an agent, compound, material, or composition containing a compound that is at least sufficient to produce a therapeutic effect. An effective amount is the quantity of a therapeutic agent necessary for preventing, curing, ameliorating, arresting or partially arresting a symptom of a disease or disorder.

[0239] As used herein, administration of a non-complement protease, such as a modified non-complement protease, refers to any method in which the non-complement protease is contacted with its substrate. Administration can be effected in vivo or ex vivo or in vitro. For example, for ex vivo administration a body fluid, such as blood, is removed from a subject and contacted outside the body with the modified non-complement protease. For in vivo administration, the modified non-complement protease can be introduced into the body, such as by local, topical, systemic and/or other route of introduction. In vitro administration encompasses methods, such as cell culture methods.

[0240] As used herein, an anticoagulant is a drug that helps prevent the clotting (coagulation) of blood. These drugs tend to prevent new clots from forming or an existing clot from enlarging.

[0241] As used herein, unit dose form refers to physically discrete units suitable for human and animal subjects and packaged individually as is known in the art.

[0242] As used herein, “patient” or “subject” to be treated includes humans and human or non-human animals. Mammals include; primates, such as humans, chimpanzees, gorillas and monkeys; domesticated animals, such as dogs, horses, cats, pigs, goats, cows; and rodents such as mice, rats, hamsters and gerbils.

[0243] As used herein, a combination refers to any association between two or among more items. The association can be spacial or refer to the use of the two or more items for a common purpose.

[0244] As used herein, a composition refers to any mixture of two or more products or compounds (e.g., agents, modulators, regulators, etc.). It can be a solution, a suspension, liquid, powder, a paste, aqueous or non-aqueous formulations or any combination thereof.

[0245] As used herein, an “article of manufacture” is a product that is made and sold. As used throughout this application, the term is intended to encompass modified protease polypeptides and nucleic acids contained in articles of packaging.

[0246] As used herein, fluid refers to any composition that can flow. Fluids thus encompass compositions that are in the form of semi-solids, pastes, solutions, aqueous mixtures, gels, lotions, creams and other such compositions.

[0247] As used herein, a “kit” refers to a packaged combination, optionally including reagents and other products and/or components for practicing methods using the elements of the combination. For example, kits containing a modified protease polypeptide or nucleic acid molecule provided herein and another item for a purpose including, but not limited to, administration, diagnosis, and assessment of a biological activity or property are provided. Kits optionally include instructions for use.

[0248] As used herein, a cellular extract refers to a preparation or fraction which is made from a lysed or disrupted cell.

[0249] As used herein, an agent is said to be randomly selected when the agent is chosen randomly without considering the specific sequences involved in the association of a protein alone or with its associated substrates, binding partners and/or other components. An example of randomly selected agents is the use of a chemical library or a peptide combinatorial library, or a growth broth of an organism or conditioned medium.

[0250] As used herein, a prodrug is a compound that, upon in vivo administration, is metabolized or otherwise converted to the biologically, pharmaceutically or therapeutically active form of the compound. To produce a prodrug, the pharmaceutically active compound is modified such that the active compound is regenerated by metabolic processes. The prodrug can be designed to alter the metabolic stability or the transport characteristics of a drug, to mask side effects or toxicity, to improve the flavor of a drug or to alter other characteristics or properties of a drug. By virtue of knowledge of pharmacodynamic processes and drug metabolism in vivo, those of skill in this art, once a pharmaceutically active compound is known, can design prodrugs of the compound (see, e.g., Nogrady (1985) Medicinal Chemistry A Biochemical Approach, Oxford University Press, New York, pages 388-392).

[0251] As used herein, a peptidomimetic is a compound that mimics the conformation and certain stereochemical features of a biologically active form of a particular peptide. In general, peptidomimetics are designed to mimic certain desirable properties of a compound, but not the undesirable properties, such as flexibility, that lead to a loss of a biologically active conformation and bond breakdown. Peptidomimetics can be prepared from biologically active compounds by replacing certain groups or bonds that contribute to the undesirable properties with bioisosteres. Bioisosteres are known to those of skill in the art. For example the methylene bioisostere CH2S has been used as an amide replacement in enkephalin analogs (see, e.g., Spatola (1983) pp. 267-357 in Chemistry and Biochemistry of Amino Acids, Peptides, and Proteins, Weinstein, Ed. volume 7, Marcel Dekker, New York). Morphine, which can be administered orally, is a compound that is a peptidomimetic of the peptide endorphin. For purposes herein, polypeptides in which one or more peptidic bonds that form the backbone of a polypeptide are replaced with bioisosteres are peptidomimetics.

[0252] As used herein, antibody includes antibody fragments, such as Fab fragments, which are composed of a light chain and the variable region of a heavy chain.

[0253] As used herein, a receptor refers to a molecule that has an affinity for a particular ligand. Receptors can be naturally-occurring or synthetic molecules. Receptors also can be referred to in the art as anti-ligands.

[0254] As used herein, primer refers to an oligonucleotide containing two or more deoxyribonucleotides or ribonucleotides, typically more than three, from which synthesis of a primer extension product can be initiated. Experimental conditions conducive to synthesis include the presence of nucleoside triphosphates and an agent for polymerization and extension, such as DNA polymerase, and a suitable buffer, temperature and pH.

[0255] As used herein, animal includes any animal, such as, but not limited to; primates including humans, gorillas and monkeys; rodents, such as mice and rats; fowl, such as chickens; ruminants, such as goats, cows, deer, sheep; ovine, such as pigs and other animals. Non-human animals exclude humans as the contemplated animal. The proteases provided herein are from any source, animal, plant, prokaryotic and fungal. Most proteases are of animal origin, including mammalian origin.

[0256] As used herein, genetic therapy or gene therapy involves the transfer of heterologous nucleic acid, such as DNA, into certain cells, target cells, of a mammal, particularly a human, with a disorder or condition for which such therapy is sought. The nucleic acid, such as DNA, is introduced into the selected target cells, such as directly or in a vector or other delivery vehicle, in a manner such that the heterologous nucleic acid, such as DNA, is expressed and a therapeutic product encoded thereby is produced. Alternatively, the heterologous nucleic acid, such as DNA, can in some manner mediate expression of DNA that encodes the therapeutic product, or it can encode a product, such as a peptide or RNA that in some manner mediates, directly or indirectly, expression of a therapeutic product. Genetic therapy also can be used to deliver nucleic acid encoding a gene product that replaces a defective gene or supplements a gene product produced by the mammal or the cell in which it is introduced. The introduced nucleic acid can encode a therapeutic compound, such as a protease or modified protease, that is not normally produced in the mammalian host or that is not produced in therapeutically effective amounts or at a therapeutically useful time. The heterologous nucleic acid, such as DNA, encoding the therapeutic product can be modified prior to introduction into the cells of the afflicted host in order to enhance or otherwise alter the product or expression thereof. Genetic therapy also can involve delivery of an inhibitor or repressor or other modulator of gene expression.

[0257] As used herein, heterologous nucleic acid is nucleic acid that is not normally produced in vivo by the cell in which it is expressed or that is produced by the cell but is at a different locus or expressed differently or that mediates or encodes mediators that alter expression of endogenous nucleic acid, such as DNA, by affecting transcription, translation, or other regulatable biochemical processes. Heterologous nucleic acid is generally not endogenous to the cell into which it is introduced, but has been obtained from another cell or prepared synthetically. Heterologous nucleic acid can be endogenous, but is nucleic acid that is expressed from a different locus or altered in its expression. Generally, although not necessarily, such nucleic acid encodes RNA and proteins that are not normally produced by the cell or in the same way in the cell in which it is expressed. Heterologous nucleic acid, such as DNA, also can be referred to as foreign nucleic acid, such as DNA. Thus, heterologous nucleic acid or foreign nucleic acid includes a nucleic acid molecule not present in the exact orientation or position as the counterpart nucleic acid molecule, such as DNA, is found in a genome. It also can refer to a nucleic acid molecule from another organism or species (i.e., exogenous).

[0258] Any nucleic acid, such as DNA, that one of skill in the art would recognize or consider as heterologous or foreign to the cell in which the nucleic acid is expressed is herein encompassed by heterologous nucleic acid; heterologous nucleic acid includes exogenously added nucleic acid that also is expressed endogenously. Examples of heterologous nucleic acid include, but are not limited to, nucleic acid that encodes traceable marker proteins, such as a protein that confers drug resistance, nucleic acid that encodes therapeutically effective substances, such as anti-cancer agents, enzymes and hormones, and nucleic acid, such as DNA, that encodes other types of proteins, such as antibodies. Antibodies that are encoded by heterologous nucleic acid can be secreted or expressed on the surface of the cell in which the heterologous nucleic acid has been introduced.

[0259] As used herein, a therapeutically effective product for gene therapy is a product that is encoded by heterologous nucleic acid, typically DNA, that, upon introduction of the nucleic acid into a host, a product is expressed that ameliorates or eliminates the symptoms, manifestations of an inherited or acquired disease or that cures the disease. Also included are biologically active nucleic acid molecules, such as RNAi and antisense.

[0260] As used herein, a control refers to a sample that is substantially identical to the test sample, except that it is not treated with a test parameter, or, if it is a plasma sample, it can be from a normal volunteer not affected with the condition of interest. A control also can be an internal control.

[0261] As used herein, recitation that a polypeptide consists essentially of a recited sequence of amino acids means that only the recited portion, or a fragment thereof, of the full-length polypeptide is present. The polypeptide can optionally, and generally will, include additional amino acids from another source or can be inserted into another polypeptide. For example, for purposes herein, recitation that a polypeptide consists essentially of the protease domain means that the only portion of the polypeptide is a protease domain or a catalytically active portion thereof. The polypeptide can optionally, and generally will, include additional non-protease derived sequences of amino acids.

[0262] As used herein, the abbreviations for any protective groups, amino acids and other compounds, are, unless indicated otherwise, in accord with their common usage, recognized abbreviations, or the IUPAC-IUB Commission on Biochemical Nomenclature (see, (1972) Biochem. 11:1726).

B. Target: Complement

[0263] The complement system and its components are the target substrates for modified proteases as provided herein. The proteases are modified or selected or identified to cleave one or more components of the system and to thereby provide a way to modulate the activity of the system. Such proteases can serve as therapeutics or as candidate therapeutics to modulate the activity of the complement system.

[0264] The complement system is part of the immune system and plays a role in the elimination of invading foreign organisms and initiates inflammatory responses. There are over 30 soluble and cell-membrane proteins that are part of the complement system. These proteins function not only in the antibody-mediated immune response, but also in the innate immune response to recognize and kill pathogens such as bacteria, virus-infected cells, and parasites. Complement proteins are produced constitutively by macrophages and hepatocytes, and are present in the circulation as inactive molecules. Several complement proteins are pro-enzyme proteases (termed zymogens) that are themselves activated by proteolytic cleavage to become effector proteases that cut peptide bonds in other complement proteins to activate them in turn. Since each activated protease can activate many substrate molecules, the initial activation is rapidly amplified to produce millions of effector molecules (a cascade). The complement system constitutes an irreversible cascade of proteolytic events whose termination results in the formation of multiple effector molecules that stimulate inflammation, facilitate antigen phagocytosis, and lyse some cells directly, and, thus, can serve as a therapeutic point of intervention for treatment of a variety of disorders that share a common pathology or include this system in the etiology or pathology.

[0265] There are three distinct pathways through which complement can be activated on the pathogen surface: the classical pathway, the alternative pathway, and the lectin pathway. These pathways are distinct in that the components required for their initiation are different, but the pathways ultimately generate the same set of effector molecules (see, e.g., FIG. 1). Likewise, the early events of each pathway are governed by a similar mechanism of triggered-enzyme cascades in which inactive complement zymogens are cleaved to yield two fragments, the larger of which is an active serine protease. The active protease is retained at the pathogen surface so that the subsequent complement zymogen is cleaved and activated to continue the proteolytic cascade of complement activation. The second fragment generated upon zymogen cleavage is a smaller peptide fragment which can act as a soluble mediator of complement functioning as an opsonin or proinflammatory mediator.

[0266] 1. Nomenclature

[0267] The complement pathway contains over 30 soluble mediators (see Table 3), some of which are generated from the cleavage of inactive protein zymogens to yield two fragments. Table 3 depicts exemplary native complement proteins and provides a description of their polypeptide sequence, including the location in the polypeptide of encoded complement fragments thereof. For example, SEQ ID NO: 315 encodes a C5 complement protein and also encodes a C5a fragment of a complement protein, encoded by residues 678-751 of C5, that exhibits complement activity upon its generation following cleavage of C5 by a C5 convertase. The native components of complement are designated by a C followed by a number such as C1, C2, etc. . . . . The numbering of the complement components is based on the order of their discovery rather than the order of the sequence of reactions within the complement cascade. As a result, the sequence of reactions of the complement cascades is C1, C4, C2, C3, C5, C6, C7, C8, and C9. Following activation, the products of the cleavage reactions are designated by adding lower case letters, the larger fragment generally being designated “b” and the smaller fragment as “a” (i.e. C4 is cleaved to generate C4b and C4a). In some instances C2a is designated as the larger cleavage product, although more generally C2b is considered the larger cleavage product. Consequently, the C3 convertase C3b2b is sometimes referred to as C3b2a. Inactive complement cleavage products are designated with an “i” (i.e. iC3b). The protein zymogen components specific to the alternative pathway of complement are not designated by a C, but are rather designated by different capital letters such as Factor B, which upon cleavage becomes Bb or Ba. The two initiating protease zymogens of the lectin pathway are designated as MASP-1 and MASP-2.

TABLE 3
Complement Proteins

| | | | Amino | | |
|---|---|---|---|---|---|
| | | Gene | acid | | SEQ ID |
| Entry Name | AC # | Name | length | Description | NO |
| C1QA_HUMAN | P02745 | C1QA | 245 | Complement C1q subcomponent, A chain precursor | 298 |
| C1QB_HUMAN | P02746 | C1QB | 251 | Complement C1q subcomponent, B chain precursor | 299 |
| C1QC_HUMAN | P02747 | C1QG, C1QC | 245 | Complement C1q subcomponent, C chain precursor | 300 |
| C1R_HUMAN | P00736 | C1R | 705 | Complement C1r subcomponent precursor (Complement | 301; 302 |
| | | | | component 1, r subcomponent) [Contains: Complement C1r | |
| | | | | subcomponent heavy chain (aa: 18-463); Complement C1r | |
| | | | | subcomponent light chain (aa: 464-705)] | |
| C1S_HUMAN | P09871 | C1S | 688 | Complement C1s subcomponent precursor (C1 esterase) | 303, 304 |
| | | | | [Contains: Complement C1s subcomponent heavy chain | |
| | | | | (aa: 16-437); Complement C1s subcomponent light chain | |
| | | | | (aa: 438-688)] | |
| C4BB_HUMAN | P20851 | C4BPB | 252 | C4b-binding protein beta chain precursor | 305 |
| C4BP_HUMAN | P04003 | C4BPA | 597 | C4b-binding protein alpha chain precursor (C4bp) (Proline- | 306 |
| | | C4BP | | rich protein) (PRP) | |
| CFAI_HUMAN | P05156 | IF | 583 | Complement factor I precursor (EC 3.4.21.45) (C3B/C4B | 307, 308 |
| | | | | inactivator) [Contains: Complement factor I heavy chain | |
| | | | | (aa: 19-335); Complement factor I light chain (340-583)] | |
| CLUS_HUMAN | P10909 | CLU | 449 | Clusterin precursor (Complement-associated protein SP- | 309 |
| | | | | 40, 40) (Complement cytolysis inhibitor) (CLI) (NA1/NA2) | |
| | | | | (Apolipoprotein J) (Apo-J) (Testosterone-repressed prostate | |
| | | | | message 2) (TRPM-2) [Contains: Clusterin beta chain | |
| | | | | (ApoJalpha) (Complement cytolysis inhibitor a chain) (aa: | |
| | | | | 23-227); Clusterin alpha chain (ApoJbeta) (Complement | |
| | | | | cytolysis inhibitor b chain) (aa: 228-449)] | |
| CO2_HUMAN | P06681 | C2 | 752 | Complement C2 precursor (EC 3.4.21.43) (C3/C5 | 310, 311 |
| | | | | convertase) | |
| CO3_HUMAN | P01024 | C3 | 1663 | Complement C3 precursor [Contains: Complement C3 beta | 312 |
| | | | | chain (aa: 23-667); Complement C3 alpha chain (aa: 672-1663); | |
| | | | | C3a anaphylatoxin (aa: 672-748); Complement C3b | |
| | | | | alpha′ chain (aa: 749-1663); Complement C3c fragment | |
| | | | | (aa: 749-954); Complement C3dg fragment (aa: 955-1303); | |
| | | | | Complement C3g fragment (aa: 955-1001); Complement | |
| | | | | C3d fragment (aa: 1002-1303); C3f fragment (aa: 1304-1320)] | |
| CO4_HUMAN | P01028 | C4A and | 1744 | Complement C4 precursor [Contains: Complement C4 beta | 313 |
| | | C4B | | chain (aa: 20-675); Complement C4 alpha chain (aa: 680-1446); | |
| | | | | C4a anaphylatoxin (680-756); C4b (aa: 757-1446); | |
| | | | | Complement C4 gamma chain (aa: 1454-1744)] | |
| CO5_HUMAN | P01031 | C5 | 1676 | Complement C5 precursor [Contains: Complement C5 beta | 314 |
| | | | | chain (aa: 19-673); Complement C5 alpha chain (aa: 678-1676); | |
| | | | | C5a anaphylatoxin (aa: 678-751); Complement C5 | |
| | | | | alpha′ chain (aa: 752-1676)] | |
| CO6_HUMAN | P13671 | C6 | 934 | Complement component C6 precursor | 315 |
| CO7_HUMAN | P10643 | C7 | 843 | Complement component C7 precursor | 316 |
| CO8A_HUMAN | P07357 | C8A | 584 | Complement component C8 alpha chain precursor | 317 |
| | | | | (Complement component 8 alpha subunit) | |
| CO8B_HUMAN | P07358 | C8B | 591 | Complement component C8 beta chain precursor | 318 |
| | | | | (Complement component 8 beta subunit) | |
| CO8G_HUMAN | P07360 | C8G | 202 | Complement component C8 gamma chain precursor | 319 |
| CO9_HUMAN | P02748 | C9 | 559 | Complement component C9 precursor [Contains: | 320 |
| | | | | Complement component C9a (aa: 22-265); Complement | |
| | | | | component C9b (aa: 266-559)] | |
| CR1_HUMAN | P17927 | CR1, | 2039 | Complement receptor type 1 precursor (C3b/C4b receptor) | 321 |
| | | C3BR | | (CD35 antigen) | |
| CR2_HUMAN | P20023 | CR2, | 1033 | Complement receptor type 2 precursor (Cr2) (Complement | 322 |
| | | C3DR | | C3d receptor) (Epstein-Barr virus receptor) (EBV receptor) | |
| | | | | (CD21 antigen) | |
| DAF_HUMAN | P08174 | DAF, | 381 | Complement decay-accelerating factor precursor (CD55 | 323 |
| | | CD55, CR | | antigen) | |
| IC1_HUMAN | P05155 | SERPING | 500 | Plasma protease C1 inhibitor precursor (C1 Inh) (C1Inh) | 324 |
| | | 1, C1IN, | | | |
| | | C1NH | | | |
| MASP1_HUMAN | P48740 | MASP1, | 699 | Complement-activating component of Ra-reactive factor | 325, 326 |
| | | CRARF, | | precursor (EC 3.4.21.—) (Ra-reactive factor serine protease | (V1); |
| | | CRARF1, | | p100) (RaRF) (Mannan-binding lectin serine protease 1) | 327, 328 |
| | | PRSS5 | | (Mannose-binding protein associated serine protease) | (V2); |
| | | | | (MASP-1) [Contains: Complement-activating component | 329, 330 |
| | | | | of Ra-reactive factor heavy chain (aa: 20-448); | (V3) |
| | | | | Complement-activating component of Ra-reactive factor | |
| | | | | light chain (aa: 449-699)] | |
| MASP2_HUMAN | O00187 | MASP2 | 686 | Mannan-binding lectin serine protease 2 precursor (EC | 331, 332 |
| | | | | 3.4.21.—) (Mannose-binding protein associated serine | (V1); |
| | | | | protease 2) (MASP-2) (MBL-associated serine protease 2) | 333, 334 |
| | | | | [Contains: Mannan-binding lectin serine protease 2 A chain | (V2) |
| | | | | (aa: 16-444); Mannan-binding lectin serine protease 2 B | |
| | | | | chain (aa: 445-686)] | |
| MBL2_HUMAN | P11226 | MBL2, | 248 | Mannose-binding protein C precursor (MBP-C) (MBP1) | 335 |
| | | MBL | | (Mannan-binding protein) (Mannose-binding lectin) | |
| MCP_HUMAN | P15529 | MCP | 392 | Membrane cofactor protein precursor (CD46 antigen) | 336 |
| | | | | (Trophoblast leukocyte common antigen) (TLX) | |
| CFAB_HUMAN | P00751 | BF | 764 | Complement factor B precursor (C3/C5 convertase) | 337, 338 |
| | | | | (Properdin factor B) (Glycine-rich beta glycoprotein) | |
| | | | | (GBG) (PBF2) [Contains: Complement factor B Ba | |
| | | | | fragment (aa: 26-259); Complement factor B Bb fragment | |
| | | | | (aa: 260-764)] | |
| CFAD_HUMAN | P00746 | DF | 253 | Complement factor D precursor (C3 convertase activator) | 339, 340 |
| | | | | (Properdin factor D) (Adipsin) | |
| CFAH_HUMAN | P08603 | CFH, HF, | 1231 | Complement factor H precursor (H factor 1) | 341, 342 |
| | | HF1 | | | |
| PROP_HUMAN | P27918 | PFC | 469 | Properdin precursor (Factor P) | 343, 344 |
| FCN2_HUMAN | Q15485 | FCN2 | 313 | Ficolin-2 (collagen/fibrinogen domain-containing protein 2; | 660 |
| | | | | ficolin B; serum lectin p35; L-Ficolin | |
| FCN1_HUMAN | O00602 | FCN1 | 326 | Ficolin-1 (collagen/fibrinogen domain-containing protein 1; | 661 |
| | | | | Ficolin A; M-Ficolin) | |
| FCN3_HUMAN | O75636 | FCN3 | 299 | Ficolin-3 (collagen/fibrinogen domain-contain 3; | 662 |
| | | | | collagen/fibrinogen domain-containing lectin 3 p35; Hakata | |
| | | | | antigen; Factor-H) | |

[0268] 2. Pathways of Complement Initiation

[0269] The pathways of complement are distinct in that they rely on different molecules and mechanisms for their initiation, but the pathways are similar in that they converge to generate the same set of effector molecules. The convergence point of the C pathways is the cleavage of C3 by C3 convertase (a C3 activating enzyme). Convertase is a general name used for a complement enzyme that converts an inactive complement protein into an active one. For example, C3 convertase converts inactive C3 to active C3a and C3b. Different enzyme complexes have C3 convertase activity. For example, in the classical pathway C4b2b acts as a C3 convertase, whereas in the alternative pathway, C3bBb is a C3 convertase (see Table 4). Cleavage of C3 generates C3b, which acts as an opsonin and as the main effector molecule of the complement system for subsequent complement reactions, and C3a, which is a peptide mediator of inflammation. The addition of C3b to each C3 convertase forms a C5 convertase to generate C5a and C5b. C5a, like C3a, is a peptide mediator of inflammation. C5b mediates the “late” events of complement activation initiating the sequence of reactions culminating in the generation of the membrane attack complex (MAC). Although the three pathways produce different C3 and C5 convertases, all of the pathways produce the split products of C3 and C5 and form MAC.

TABLE 4
Complement Cascades

| | Alternative Pathway | Classical Pathway | Lectin Pathway |
|---|---|---|---|
| Activators | Pathogen surface | antigen-bound IgM and | Pathogens via recognition |
| | molecules | IgG; non-immune | of carbohydrates on |
| | LPS, teichoic acid, | molecules | surface |
| | zymosan | | |
| C3 convertase | C3bBb | C4b2b | C4b2b |
| C5 convertase | C3bBb3b | C4b2b3b | C4b2b3b |
| MAC | C5678poly9 | C5678poly9 | C5678poly9 |
| anaphylatoxins | C3a, C5a | C3a, C4a, C5a | C3a, C4a, C5a |

[0270] a. Classical Pathway

[0271] C1q is the first component of the classical pathway of complement. C1q is a calcium-dependent binding protein associated with the collectin family of proteins due to an overall shared structural homology (Malhotra R et al., Clin Exp Immunol. 1994, 97(2):4-9; Holmskov et al. Immunol Today. 1994, 15(2):67-74). Mannose binding lectin (MBL), the first component of the lectin pathway, also is a member of the collectin family. Collectins are named because they contain a collagen-like and lectin domain. The amino-terminal collagen-like region of the collectin structure interacts with cell surface receptors and confers structural stability to the protein. The carboxy-terminal regions of the collectin structure have a calcium-dependent lectin activity. The lectin domain mediates the interaction of the collectins with a wide variety of pathogens due to the recognition of carbohydrate moieties on the surface of pathogens. Collectins, often called pattern recognition molecules, generally function as opsonins to target pathogens for phagocytosis by immune cells. In contrast to conventional collectins, such as MBL, the carboxy-terminal globular recognition domain of C1q does not have lectin activity but can serve as a “charged” pattern recognition molecule due to marked differences in the electrostatic surface potential of its globular domains (Gaboriaud et al. J. Biol. Chem., 2003, 278(47): 46974-46982).

[0272] C1q initiates the classical pathway of complement in two different ways. First, the classical pathway is activated by the interaction of C1q with immune complexes (i.e. antigen-antibody complexes or aggregated IgG or IgM antibody) thus linking the antibody-mediated humoral immune response with complement activation. When the Fab portion (the variable region) of IgM or IgG binds antigen, the conformation of the Fc (constant) region is altered, allowing C1q to bind. C1q must bind at least 2 Fc regions to be activated, so it takes two IgG molecules to activate C1q. Serum IgM is a pentamer of five IgM molecules with five Fc regions, so IgM activates complement most efficiently. IgA, IgE and IgD do not bind C1q and cannot activate complement. C1q, however, also is able to activate complement in the absence of antibody thereby functioning in the innate or immediate immune response to infection. Besides antibody, complement activation also is achieved by the interaction of C1q with non-immune molecules such as polyanions (bacterial lipopolysaccharides, DNA, and RNA), certain small polysaccharides, viral membranes, C reactive protein (CRP), serum amyloid P component (SAP), and bacterial, fungal and virus membrane components.

[0273] C1q is part of the C1 complex which contains a single C1q molecule bound to two molecules each of the zymogens C1r and C1s. Binding of more than one of the C1q globular domains to a target surface (such as aggregated antibody or a pathogen), causes a conformational change in the (C1r:C1s)₂ complex which results in the activation of the C1r protease to cleave C1s to generate an active serine protease. Active C1s cleaves subsequent complement components C4 and C2 to generate C4b and C2b, which together form the C3 convertase of the classical pathway. The C3 convertase cleaves C3 into C3b, which covalently attaches to the pathogen surface and acts as an opsonin, and C3a, which stimulates inflammation. Some C3b molecules associate with C4b2b complexes yielding C4b2b3b which is the classical cascade C5 convertase. Table 5 summarizes the proteins involved in the classical pathway of complement.

TABLE 5
Proteins of the Classical Pathway

| Native | | |
|---|---|---|
| Component | Active Form | Function of the Active Form |
| C1 | C1q | Binds directly to pathogen surfaces |
| (C1q:(C1r:C1s)₂) | | or indirectly to antibody |
| | | bound to pathogens |
| | C1r | Cleaves C1s to an active protease |
| | C1s | Cleaves C4 and C2 |
| C4 | C4b | Binds to pathogen and acts as an |
| | | opsonin; binds C2 for cleavage by C1s |
| | C4a | Peptide mediator of inflammation |
| C2 | C2b | Active enzyme of classical pathway |
| | | C3/C5 convertase; cleaves C3 and C5 |
| | C2a | Precursor of vasoactive C2 kinin |
| C3 | C3b | Binds to pathogen surfaces and acts as |
| | | an opsonin; initiates amplification via |
| | | the alternative pathway; binds C5 for |
| | | cleavage by C2b |
| | C3a | Peptide mediator of inflammation |

[0274] b. Alternative Pathway

[0275] The alternative pathway is initiated by foreign pathogens in the absence of antibody. Instead, the initiation of complement by the alternative pathway occurs through the spontaneous hydrolysis of C3 into C3b. A small amount of C3b is always present in body fluids, due to serum and tissue protease activity. Host self-cells normally contain high levels of membrane silica acid which inactivate C3b if it binds, but bacteria contain low external sialic acid and thereby bind C3b without inactivating it. C3b on pathogen surfaces is recognized by the protease zymogen Factor B. Factor B is cleaved by Factor D. Factor D is the only activating protease of the C system that circulates as an active enzyme rather than as a zymogen, but since Factor B is the only substrate for Factor D the presence of low levels of an active protease in normal serum is generally safe for the host. Cleavage of Factor B by Factor D yields the active product Bb which can associate with C3b to form C3bBb, the C3 convertase of the alternative pathway. Similar to the classical pathway, the C3 convertase produces more C3b and C3a from C3. C3b covalently attaches to the pathogen surface and acts as an opsonin, while C3a stimulates inflammation. Some C3b joins the complex to form C3bBb3b, the alternative pathway C5 convertase. C3bBb3b is stabilized by the plasma protein properdin or Factor P which binds to microbial surfaces and stabilizes the convertase. Table 6 summarizes the proteins involved in the alternative pathway of complement.

TABLE 6
Proteins of the Alternative Pathway

| Native | | |
|---|---|---|
| Component | Active Form | Function of the Active Form |
| C3 | C3b | Binds to pathogen surface, binds Factor B |
| | | for cleavage by Factor D |
| Factor B | Ba | Small fragment of Factor B, unknown |
| | | function |
| | Bb | Active enzyme of the C3 convertase and C5 |
| | | convertase |
| Factor D | D | Plasma serine protease, cleaves Factor B |
| | | when it is bound to C3b to Ba and Bb |
| Factor P | P | Plasma proteins with affinity for C3bBb |
| (properdin) | | convertase on bacterial cells; stabilizes |
| | | convertase |

[0276] c. Lectin

[0277] The lectin pathway (also referred to as the MBL pathway) is initiated following recognition and binding of pathogen-associated molecular patterns (PAMPs; i.e. carbohydrates moieties) by lectin proteins. Examples of lectin proteins that activate the lectin pathway of complement include mannose binding lectin (MBL) and ficolins (i.e. L-ficolin, M-ficolin, and H-ficolin). As mentioned above, MBL is a member of the collectin family of proteins and thereby exists as an oligomer of subunits composed of identical polypeptide chains each of which contains a cysteine-rich, a collagen-like, a neck, and a carbohydrate-recognition or lectin domain. MBL acts as a pattern recognition molecule to recognize carbohydrate moieties, particularly neutral sugars such as mannose or N-acetylglucosamine (GlcNAc) on the surface of pathogens via its globular lectin domain in a calcium-dependent manner. Besides a role in the complement system, MBL also acts as an opsonin to facilitate the phagocytosis of bacterial, viral, and fungal pathogens by phagocytic cells. In addition, other initiators of the lectin pathway include the ficolins including L-ficolin, M-ficolin, and H-ficolin (see e.g., Liu et al. (2005) J Immunol., 175:3150-6). Similar to MBL, ficolins recognize carbohydrate moieties such as, for example, N-acetyl glucosamine and mannose structures.

[0278] The activation of the alternative pathway by MBL or ficolins is analogous to activation of the classical pathway by C1q whereby a single lectin molecule interacts with two protease zymogens. In the case of the lectin proteins, the zymogens are MBL-associated serine proteases, MASP-1 and MASP-2, which are closely homologous to the C1r and C1s zymogens of the classical pathway. Upon recognition of a PAMP by a lectin protein, such as for example by binding to a pathogen surface, MASP-1 and MASP-2 are activated to cleave C4 and C2 to form the MBL cascade C3 convertase. C3b then joins the complex to form the MBL cascade C5 convertase. MASP activation is implicated not only in responses to microorganisms, but in any response that involves exposing neutral sugars, including but not limited to tissue injury, such as that observed in organ transplants. Like the alternative cascade, the MBL cascade is activated independent of antibody; like the classical cascade, the MBL cascade utilizes C4 and C2 to form C3 convertase. Table 7 summarizes the proteins involved in the lectin pathway of complement.

TABLE 7
Proteins of the Lectin Pathway

| Native | | |
|---|---|---|
| Component | Active Form | Function of the Active Form |
| MBL | MBL | Recognizes PAMPs, such as on pathogen |
| | | surfaces (e.g., via recognition of |
| | | carbohydrates) |
| Ficolins | L-Ficolin; M- | Recognizes PAMPs, such as on pathogen |
| | Ficolin, or H- | surfaces (e.g., via recognition of |
| | Ficolin | carbohydrates) |
| MASP-1 | MASP-1 | Cleaves C4 and C2 |
| MASP-2 | MASP-2 | Cleaves C4 and C2 |

[0279] 3. Complement-Mediated Effector Functions

[0280] Regardless of which initiation pathway is used, the end result is the formation of activated fragments of complement proteins (e.g. C3a, C4a, and C5a anaphylatoxins and C5b-9 membrane attack complexes). These fragments mediate several functions including leukocyte chemotaxis, activation of macrophages, vascular permeability and cellular lysis (Frank, M. and Fries, L. Complement. In Paul, W. (ed.) Fundamental Immunology, Raven Press, 1989). A summary of some effector functions of complement products are listed in Table 8.

TABLE 8
Complement Effector Molecules and Functions

| Product | Activity |
|---|---|
| C2b (prokinin) | accumulation of body fluid |
| C3a (anaphylatoxin) | basophil and mast cell degranulation; enhanced vascular permeability; |
| | smooth muscle contraction; Induction of suppressor T cells |
| C3b and its products | opsonization; Phagocyte activation |
| C4a (anaphylatoxin) | basophil & mast cell activation; smooth muscle contraction; enhanced |
| | vascular permeability |
| C4b | opsonization |
| C5a (anaphylatoxin; | basophil & mast cell activation; enhanced vascular permeability; smooth |
| chemotactic factor) | muscle contraction; chemotaxis; neutrophil aggregation; oxidative |
| | metabolism stimulation; stimulation of leukotriene release; induction of |
| | helper T-cells |
| C5b67 | chemotaxis; attachment to other cell membranes and lysis of bystander |
| | cells |
| C5b6789 (C5b-9) | lysis of target cells |

[0281] a. Complement-Mediated Lysis: Membrane Attack Complex

[0282] The final step of the complement cascade by all three pathways is the formation of the membrane attack complex (MAC) (FIG. 1). C5 can be cleaved by any C5 convertase into C5a and C5b. C5b combines with C6 and C7 in solution, and the C5b67 complex associates with the pathogen lipid membrane via hydrophobic sites on C7. C8 and several molecules of C9, which also have hydrophobic sites, join to form the membrane attack complex, also called C5b6789 or C5b-9. C5b-9 forms a pore in the membrane through which water and solutes can pass, resulting in osmotic lysis and cell death. If complement is activated on an antigen without a lipid membrane to which the C5b67 can attach, the C5b67 complex can bind to nearby cells and initiate bystander lysis. A single MAC can lyse an erythrocyte, but nucleated cells can endocytose MAC and repair the damage unless multiple MACs are present. Gram negative bacteria, with their exposed outer membrane and enveloped viruses, are generally susceptible to complement-mediated lysis. Less susceptible are Gram positive bacteria, whose plasma membrane is protected by their thick peptidoglycan layer, bacteria with a capsule or slime layer around their cell wall, or viruses which have no lipid envelope. Likewise, the MAC can be disrupted by proteins that bind to the complex before membrane insertion such as Streptococcal inhibitor of complement (SIC) and clusterin. Typically, the MAC helps to destroy gram-negative bacteria as well as human cells displaying foreign antigens (virus-infected cells, tumor cells, etc.) by causing their lysis and also can damage the envelope of enveloped viruses.

[0283] b. Inflammation

[0284] Inflammation is a process in which blood vessels dilate and become more permeable, thus enabling body defense cells and defense chemicals to leave the blood and enter the tissues. Complement activation results in the formation of several proinflammatory mediators such as C3a, C4a, and C5a. The intact anaphylatoxins in serum or plasma are quickly converted into the more stable, less active C3a-desArg, C4a-desArg, or C5a-desArg forms, by carboxypeptidase N. C3a, C4a and C5a, and to a lesser extent their desArg derivatives, are potent bioactive polypeptides, termed anaphylatoxins because of their inflammatory activity. Anaphylatoxins bind to receptors on various cell types to stimulate smooth muscle contraction, increase vascular permeability, and activate mast cells to release inflammatory mediators. Among the three anaphylatoxins, C5a is the most potent. C5a primarily acts on white blood cells, and in particular neutrophils. C5a stimulates leukocyte adherence to blood vessel walls at the site of infection by stimulating the increased expression of adhesion molecules so that leukocytes can squeeze out of the blood vessels and into the tissues, a process termed diapedesis. C5a also stimulates neutrophils to produce reactive oxygen species for extracellular killing, proteolytic enzymes, and leukotrienes. C5a also can further amplify the inflammatory process indirectly by inducing the production of chemokines, cytokines, and other proinflammatory mediators. C5a also interacts with mast cells to release vasodilators such as histamine so that blood vessels become more permeable. C3a also interacts with white blood cells, with major effects on eosinophils suggesting a role for C3a in allergic inflammation. C3a induces smooth muscle contraction, enhances vascular permeability, and causes degranulation of basophils and release of histamine and other vasoactive substances. C2a can be converted to C2 kinin, which regulates blood pressure by causing blood vessels to dilate.

[0285] Although technically not considered an anaphylatoxin, iC3b, an inactive derivative of C3b, functions to induce leukocyte adhesion to the vascular endothelium and induce the production of the pro-inflammatory cytokine IL-1 via binding to its cell surface integrin receptors. C5b-9 also indirectly stimulates leukocyte adhesion, activation, and chemotaxis by inducing the expression of cell adhesion molecules such as E-selectin, and inducing interleukin-8 secretion (Bhole et al. (2003) Crit Care Med 31(1): 97-104). C5b-9 also stimulates the release of secondary mediators that contribute to inflammation, such as for example prostaglandin E₂, leukotriene B₄, and thromboxane.

[0286] Conversion of the human complement components C3 and C5 to yield their respective anaphylatoxin products has been implicated in certain naturally occurring pathologic states including: autoimmune disorders such as systemic lupus erythematosus, rheumatoid arthritis, malignancy, myocardial infarction, Purtscher's retinopathy, sepsis and adult respiratory distress syndrome. In addition, increased circulating levels of C3a and C5a have been detected in certain conditions associated with iatrogenic complement activation such as: cardiopulmonary bypass surgery, renal dialysis, and nylon fiber leukaphoresis. Elevated levels of C4a anaphylatoxin is associated with the autoimmune disorders mentioned above.

[0287] c. Chemotaxis

[0288] Chemotaxis is a process by which cells are directed to migrate in response to chemicals in their environment. In the immune response, a variety of chemokines direct the movement of cells, such as phagocytic cells, to sites of infection. For example, C5a is the main chemotactic factor for circulating neutrophils, but also can induce chemotaxis of monocytes. Phagocytes will move towards increasing concentrations of C5a and subsequently attach, via their CR1 receptors, to the C3b molecules attached to the antigen. The chemotactic effect of C5a, observed with basophils, eosinophils, neutrophils, and mononuclear phagocytes, is active at concentrations as low as 10⁻¹⁰M.

[0289] d. Opsonization

[0290] An important action of complement is to facilitate the uptake and destruction of pathogens by phagocytic cells. This occurs by a process termed opsonization whereby complement components bound to target bacteria interact with complement receptors on the surface of phagocytic cells such as neutrophils or macrophages. In this instance, the complement effector molecules are termed opsonins. Opsonization of pathogens is a major function of C3b and C4b. iC3b also functions as an opsonin. C3a and C5a increase the expression of C3b receptors on phagocytes and increase their metabolic activity.

[0291] C3b and, to a lesser extent, C4b help to remove harmful immune complexes from the body. The C3b and C4b attach the immune complexes to CR1 receptors on erythrocytes. The erythrocytes then deliver the complexes to fixed macrophages within the spleen and liver for destruction. Immune complexes can lead to a harmful Type III hypersensitivity

[0292] e. Activation of the Humoral Immune Response

[0293] Activation of B cells requires ligation of the B cell receptor (BCR) by antigen. It has been shown, however, that complement plays a role in lowering the threshold for B cell responses to antigen by up to 1000-fold. This occurs by the binding of C3d or C3dg, complement products generated from the breakdown fragments of C3, to CR2 receptors on B-lymphocytes which can co-ligate with the BCR. Co-ligation occurs when antigenic particles, such as for example immune complexes, opsonized with C3d binds the CR2 receptor via C3d as well as the BCR through antigen. Co-ligation of antigen complexes also can occur when C3d binds to antigens enhancing their uptake by antigen presenting cells, such as dendritic cells, which can then present the antigen to B cells to enhance the antibody response. Mice deficient in CR2 display defects in B cell function that result in reduced levels of natural antibody and impaired humoral immune responses.

[0294] 4. Complement Receptors

[0295] The recognition of complement effector molecules by cells for the initiation of effector functions such as chemotaxis and opsonization is mediated by a diverse group of complement receptors. The complement receptors are distributed on a wide range of cell types including erythrocytes, macrophages, B cells, neutrophils, and mast cells. Upon binding of a complement component to the receptor, the receptors initiate an intracellular signaling cascade resulting in cell responses such as stimulating phagocytosis of bacteria and secreting inflammatory molecules from the cell. For example, the complement receptors CR1 and CR2 which recognize C3b, C4b, and their products are important for stimulating chemotaxis. CR3 (CD11b/CD18) and CR4 (CD11c/CD18) are integrins that are similarly important in phagocytic responses but also play a role in leukocyte adhesion and migration in response to iC3b. The C5a and C3a receptors are G protein-coupled receptors that play a role in many of the pro-inflammatory-mediated functions of the C5a and C3a anaphylatoxins. For example, receptors for C3a, C3aR, exist on mast cells, eosinophils, neutrophils, basophils and monocytes and are directly involved in the pro-inflammatory effects of C3a.

[0296] 5. Complement Regulation

[0297] Although the complement system is beneficial to the host by protecting against foreign pathogens, the production of inflammatory mediators can be toxic and damaging leading to a wide variety of inflammatory disease conditions as discussed below. Likewise, although most of the active proteases of the complement system are zymogens that only become activated locally upon cleavage, nearly all components of complement are spontaneously activated at low rates in serum and thus their activity needs to be minimized. Consequently, regulatory proteins of the complement system have been identified. Their primary functions are to regulate the activity of complement activating molecules for prevention of excessive complement activation and autolytic destruction of host tissues. These complement regulators are either soluble plasma proteins or integral membrane proteins expressed on a variety of cell types. The former include C4b binding protein (C4bp) and Factor H. The latter include the C3b/C4b receptor (Complement receptor 1, CR1, CD35), membrane cofactor protein (MCP, CD46), and decay accelerating factor (DAF, CD55). These proteins possess many structural similarities. Each is composed of multiple short consensus repeats (SCRs) of approximately 60 amino acids in length having conserved cysteine, glycine and proline residues. The genes encoding these proteins have been localized to chromosome 1 and are collectively known as the regulators of complement activation (RCA) gene cluster (Hourcade et al. (1989) Adv. Immunol. 45:381).

[0298] C1 inhibitor (C1INH) is a serine proteinase inhibitor or serpin which dissociates activated C1r and C1s from C1q, limiting the time the complex is active. C1INH also blocks spontaneous activation of C1 by plasma proteases. Deficiency in C1INH is associated with serious sudden edema (swelling) called Angioneurotic Edema. Several inhibitory proteins dissociate the C3 and C5 convertases and promote degradation of C4b and C3b by Factor I, a plasma protease. Factor I circulates in an active form but it is only able to cleave C3b and C4b when they are bound to a cofactor protein. Factor I cleaves C3b leading to the production of iC3b, C3c, C3d, C3f, and C3dg thereby permanently inactivating C3b, although the degradation products can act as effector molecules, since, for example, iC3b acts as an opsonin. C4b is inactivated upon cleavage into C4c and C4d. The inhibitory proteins that serve as cofactors for Factor I include plasma proteins C4 binding protein that dissociates classical C3 convertase, and Factor H that dissociates alternative C3 convertase, and membrane proteins Complement Receptor 1 (CR1), Decay Accelerating Factor (DAF), and Membrane Cofactor Protein (MCP) that inhibit the activity of both pathways. Cofactors for Factor I regulate its activity. For example, human cells produce Factor H that binds to C3b and allows Factor I to inactivate C3b. On the other hand, substances such as LPS on bacterial cells, which otherwise do not express Factor I cofactors, facilitate the binding of Factor B to C3b and this protects the C3b from inactivation by Factor I.

[0299] Other membrane and plasma proteins block the formation of MAC on host cells to prevent the inappropriate insertion of MAC into membranes. Several plasma proteins, such as the soluble protein C8β, bind to the C5b67 complex and inhibit its insertion into the cell membrane. Host cell membranes also contain a membrane-bound protein called HRF (CD59, protectin) which inhibits the binding of C9 to C5b678 to prevent formation of the membrane attack complex on autologous or allogenic cells.

[0300] Factor I

[0301] Factor I (fI) is one of several serine proteases (also including factor D, MBL-associated serine protease (MASP)-2, C1s, C1r, factor B, and C2) of the complement system that play a role in the generation and amplification of the complement cascade reactions. All of the complement serine proteases share domain homology with the trypsin family and share some of the structural attributes that determine substrate specificity. The C-terminus of Factor I is made up of a trypsin-like serine protease light chain that, based on homology to other serine proteases, contains the residues that form the His-Asp-Ser catalytic triad. Additionally, residues are present that define the specificity pocket (D⁵⁰¹) and the extended substrate binding site S⁵²⁷, W⁵²⁸, and G⁵²⁹ (based on numbering of the mature protein in the absence of the signal peptide, see for example, Tsiftsoglou et al., (2005) Biochemistry 44:6239).

[0302] Factor I plays a role in modulating complement activation by cleaving C3b and C4b, components of the C3 convertase in the classical, alternative, and lectin pathways thereby inactivating the pathways. Cleavage of fI substrates, C3b and C4b, requires a conformational change in the substrates caused by the formation of a thioester bond. For example, proteolytic activation of C3 to C3b by convertase results in a conformational change from the latent form to the C3b form which leads to reaction of an intramolecular thiolester with nucleophiles, such as water, thereby rendering C3b susceptible to fl cleavage (Ogata et al., (1998) J Immunol 161:4785). Reaction of the thioester with water can occur in the absence of convertase cleavage, giving a hydrolyzed inactive form of C3 and C4 termed iC3 and iC4. For example, the iC3 species is a mimic of C3b; iC3 is sensitive to fI cleavage and can substitute for C3b in the C3 and C5 convertases. Generally, cleavage of the C3b and C4b substrates by Factor I requires the formation of a ternary complex with a cofactor protein, such as factor H or C4-binding protein, and MCP. Cleavage of synthetic substrates by Factor I, however, does not require the presence of cofactors (Tsiftsoglou et al., (2004) J Immunol 173:367-375). Cleavage by fI is restricted to cleavage of arginyl bonds in the substrate. fI cleavage sites in C3 are LPSR (SEQ ID NO: 388) and SLLR (SEQ ID NO: 389) and a cleavage site in C4 is HRGR (SEQ ID NO:390).

[0303] 6. Complement-Mediated Diseases and Disorder

[0304] By virtue of the pivotal role of the complement system in the etiology of diseases and disorders, the system can serve as a point of therapeutic intervention in such diseases and disorders. The proteases provided herein target this system and permit modulation thereof.

[0305] The skilled artisan understands the role of the complement system in disease processes and is aware of a variety of such diseases. The following is a discussion of exemplary diseases and the role of the complement system in their etiology and pathology. Modulation of the complement system by the proteases provided herein can serve to treat such diseases. Diseases can involve complement activation or inhibition.

[0306] a. Disease Mediated by Complement Activation

[0307] The complement cascade is a dual-edged sword, causing protection against bacterial and viral invasion by promoting phagocytosis and inflammation. Conversely, even when complement is functioning normally, it can contribute to the development of disease by promoting local inflammation and damage to tissues. Thus, pathological effects are mediated by the same mediators that are responsible for the protective roles of complement. For example, the anaphylactic and chemotactic peptide C5a drives inflammation by recruiting and activating neutrophils, C3a can cause pathological activation of other phagocytes, and the membrane attack complex can kill or injure cells. In one example, such as in many autoimmune diseases, complement produces tissue damage because it is activated under inappropriate circumstances such as by antibody to host tissues. In other situations, complement can be activated normally, such as by septicemia, but still contributes to disease progression, such as in respiratory distress syndrome. Pathologically, complement can cause substantial damage to blood vessels (vasculitis), kidney basement membrane and attached endothelial and epithelial cells (nephritis), joint synovium (arthritis), and erythrocytes (hemolysis) if it is not adequately controlled.

[0308] Complement has a role in immuno-pathogenesis of a number of disorders, including autoimmune diseases such as rheumatoid arthritis (see, e.g., Wang et al. (1995) Proc. Natl. Acad. Sci. U.S.A. 92:8955-8959; Moxley et al. (1987) Arthritis & Rheumatism 30:1097-1104), lupus erythematosus (Wang et al. (1996) Proc. Natl. Acad. Sci. U.S.A. 90:8563-8568; and Buyon et al. (1992) Arthritis Rheum. 35:1028-1037) and acute glomerulonephritis (Couser et al. (1995) J Am Soc Nephrol. 5:1888-1894). Other pathologies that involve activation of the complement system include sepsis (see, e.g., Stove et al. (1996) Clin Diag Lab Immunol 3:175-183; Hack et al. (1989) Am. J. Med. 86:20-26), respiratory distress syndrome (see, e.g., Zilow et al. (1990) Clin. Exp. Immunol. 79:151-157; and Stevens et al. (1986) J. Clin. Invest. 77:1812-1816), multiorgan failure (see, e.g., Hecke et al. (1997) Shock 7:74; and Heideman et al. (1984) J. Trauma 24:1038-1043) and ischemia-reperfusion injury such as occurs in cardiovascular disease such as stroke or myocardial infarct (Austen W G et al. (2003) Int J Immunopathol Pharm 16(1):1-8). Some exemplary examples of complement-mediated disease are described below.

[0309] i. Rheumatoid Arthritis

[0310] Rheumatoid arthritis (RA) is a chronic inflammatory illness. It is an autoimmune disease in which the immune system attacks normal tissue components as if they were invading pathogens. The inflammation associated with rheumatoid arthritis primarily attacks the linings of the joints. The membranes lining the blood vessels, heart, and lungs also can become inflamed. RA is characterized by activated B cells and plasma cells that are present in inflamed synovium, and in established disease lymphoid follicles and germinal centers. This results in high levels of local immunoglobulin production and the deposition of immune complexes, which can include IgG and IgM rheumatoid factors, in the synovium and in association with articular cartilage which can serve as initiators of the complement cascade. Elevated levels of complement components, such as C3a, C5a, and C5b-9 have been found within the inflamed rheumatoid joints. These complement components can exacerbate the inflammation associated with RA by inducing a variety of proinflammatory activities such as for example, alterations in vascular permeability, leukocyte chemotaxis, and the activation and lysis of multiple cell types.

[0311] ii. Sepsis

[0312] Sepsis is a disease caused by a serious infection, such as a bacterial infection, leading to a systemic inflammatory response. The bacterial cell wall component, lipopolysaccharide, is often associated with sepsis, although other bacterial, viral, and fungal infections can stimulate septic symptoms. Septic shock often results if the natural immune system of the body is unable to defend against an invading microorganism such that, for example, the pro-inflammatory consequences of the immune response is damaging to host tissues. The early stages of sepsis are characterized by excessive complement activation resulting in increased production of complement anaphylatoxins, such as C3a, C4a, and C5a which act to increase vascular permeability, stimulate superoxide production from neutrophils and stimulate histamine release. The actions of C5a can contribute to a productive immune response to a bacterial infection, but if left unregulated, C5a also can be severely damaging. In an E. coli-induced model of inflammation, blockade of C5a improved the outcome of septic animals by limiting C5a-mediated neutrophil activation that can lead to neutrophil-mediated tissue injury.

[0313] The continued impairment of the innate immune response to a bacterial infection often leads to chronic sepsis or septic shock, which can be life-threatening. In the late stage of sepsis, it is the “dormant” activity of neutrophils, as opposed to the hyperactivity that occurs in the early phases, that contributes to continued disease. In the late stage, the major functions of neutrophils including chemotaxis, respiratory burst activity, and ability for bacterial killing are reduced. Complement, and in particular C5a, also play a role in the later stages of sepsis. Excessive production of C5a during sepsis is associated with the “deactivation” of blood neutrophils, a process that has been linked to C5a-induced downregulation of its own receptor, C5aR, on neutrophils (Guo et al. (2003) FASEB J 13:1889). The reduced levels of C5aR on neutrophils correlates with a diminished ability of blood neutrophils to bind C5a, impaired chemotactic responses, a loss of superoxide productions, and impaired bactericidal activity. C5aR levels, however, can begin to “recover” at later stages of sepsis and correlate with instances of beneficial disease outcome.

[0314] iii. Multiple Sclerosis

[0315] Multiple sclerosis (MS) and its animal model experimental allergic encephalomyelitis (EAE) are inflammatory demyelinating diseases of the central nervous system (CNS). In MS, inflammation of nervous tissue causes the loss of myelin, a fatty material which acts as a sort of protective insulation for the nerve fibers in the brain and spinal cord. This demyelination leaves multiple areas of scar tissue (sclerosis) along the covering of the nerve cells, which disrupts the ability of the nerves to conduct electrical impulses to and from the brain, producing the various symptoms of MS. MS is mediated by activated lymphocytes, macrophages/microglia and the complement system. Complement activation can contribute to the pathogenesis of these diseases through its dual role: the ability of activated terminal complex C5b-9 to promote demyelination and the capacity of sublytic C5b-9 to protect oligodendrocytes (OLG) from apoptosis.

[0316] iv. Alzheimer's Disease

[0317] Alzheimer's disease (AD) is characterized by tangles (abnormal paired helical filaments of the protein tau, which normally binds to microtubules) and plaques (extracellular deposits composed primarily of beta-amyloid protein) within the brain. Although, it is not entirely clear the what the precise cause of AD is, chronic neuroinflammation in affected regions of AD brains suggest that proinflammatory mediators can play a role. The tangles and plaques within an AD brain are deposited with activated complement fragments, such as for example, C4d and C3d. Likewise, dystrophic neurites in AD brain can be immunostained for MAC, indicating autocatalytic attack of these neurites and concomitant neurite loss in AD. Activation of complement in AD occurs by an antibody-independent mechanism induced by aggregated beta-amyloid protein. Further, the complement cascade can be activated by the pentraxins, C-reactive protein (CRP), and amyloid P (AP) which are all upregulated in AD (McGeer et al., (2002) Trends Mol Med 8:519). The activation of complement in AD, marked by increases in complement mediators, is not adequately controlled by a compensatory upregulation of complement regulatory proteins such as, for example, CD59. Thus, the proinflammatory consequences of complement activation exacerbates AD disease progression and likely contributes to neurite destruction.

[0318] v. Ischemia-Reperfusion Injury

[0319] Ischemia-reperfusion injury is the injury sustained after an ischemic event and subsequent restoration of blood flow and results from the inflammatory response to a hypoxic insult. Ischemia-reperfusion damage can be acute as during cardiac surgery procedures, such as for example following open heart surgery or angioplasty, or chronic as with congestive heart failure or occlusive cardiovascular disease. Examples of injuries that can cause ischemia-reperfusion injury include myocardial infarct (MI) and stroke. The initiation of an inflammatory response is likely caused by the increase in tissue oxygen levels that occur with reperfusion and the concomitant accumulation of metabolites that can generate oxygen free radicals which are immunostimulatory. It is associated with a variety of events including severity of myocardial infarction, cerebral ischemic events, intestinal ischemia, and many aspects of vascular surgery, cardiac surgery, trauma, and transplantation. The injury is manifested by inflammatory events of the innate immune system, particularly activation of the complement system, in response to newly altered tissue as non-self. As such ischemia-reperfusion injury is characterized by tissue edema caused by increased vascular permeability, and an acute inflammatory cell infiltrate caused by influx of polymorphonuclear leukocytes.

[0320] Activation of the complement system plays a role in the inflammatory events of ischemia-reperfusion injury. The ischemia injury results in alterations of the cell membrane, affecting lipids, carbohydrates, or proteins of the external surface such that these exposed epitopes are altered and can act as neo-antigens (modified self antigens). Circulating IgM recognize and bind the neo-antigens to form immune complexes on the injured cell surface. The antigen-antibody complexes formed are classic activators of the classical pathway of complement, although all pathways are likely involved in some way to the exacerbating effects of the injury. The involvement of the classical pathway of complement to ischemia-reperfusion injury is evidenced by mice genetically deficient in either C3 or C4 that display equal protection from local injury in a hindlimb and animal model of injury (Austen et al. (2003) Int J Immunopath Pharm 16:1). Conversely, in a kidney model of ischemia injury, C3-, C5-, and C6-deficient mice were protected whereas C4-deficient mice were not, suggesting the importance of the alternative complement pathway (Guo et al. (2005) Ann Rev Immunol 23:821). Mediators induced upon complement activation initiate an inflammatory response directed at the cell membrane at the site of local injury.

[0321] A major effector mechanism of complement in ischemia-reperfusion injury is the influx and activation of neutrophils to the inflamed tissue by complement components, such as for example C5a. Activation of neutrophils results in increased production of reactive oxygen species and the release of lysosomal enzymes in local injured organs which ultimately results in apoptosis, necrosis, and a loss or organ function. The generation of the terminal MAC, C5b-9, also contributes to local tissue injury in ischemia-reperfusion injury.

[0322] b. Disease Mediated by Complement Deficiencies

[0323] The development of disease also can occur due to the absence of complement components that are important for controlling infection. Complement deficiencies are linked with frequent infections and immune complex diseases. Deficiencies have been identified in all of the complement factors except C9, including Factor D and properdin. Deficiencies also have been identified in the complement regulatory proteins C1INH, Factor I, Factor H, DAF, and HRF.

[0324] In general, deficiencies in complement components result in increased bacterial infections due to reduced opsonization and phagocytosis. Typically, deficiencies in complement components that function as opsonins, such as for example C3b, result in increased susceptibility to infection. For example, whereas individuals deficient in any of the late components of complement are relatively unaffected, individuals lacking C3 or any of the molecules that catalyze C3b deposition show increased susceptibility to infection by a wide range of extracellular bacteria. Likewise, people deficient in MBL, which normally functions as a traditional opsonin and as the initiator of the lectin pathway of complement following recognition of foreign pathogens, have increased susceptibility to infection, particularly during early childhood. The role of deficiencies in the late components of complement, including C5-C9 that are involved in the formation of the membrane attack complex, to bacterial infection is more limited. Deficiencies in C5-C9 have only been shown to be associated with susceptibility to infection by Neisseria species, the bacteria that causes gonorrhea and bacterial meningitis.

[0325] Another consequence of complement deficiency is immune complex disease. Immune complex disease is caused by complement-mediated inflammation in response to persisting antigen-antibody complexes in the circulation and the tissues. Since the early components of the classical complement pathway initiate complement in response to the recognition of antigen-antibody complexes, deficiencies of these early components, such as for example C1q, can cause significant pathology in autoimmune disease such as systemic lupus erythematosus.

[0326] Deficiencies in complement regulatory proteins such as Factor H, DAF, and HRF also can result in complement-mediated disease. For example, uncontrolled complement activation can result in depletion of complement proteins resulting in an increased infection by bacteria, particularly ubiquitous pyogenic bacteria. This is the case in genetic factor I deficiency where factor I is not present and unable to inhibit the activation of the C3 convertase. Other examples include the complement regulatory proteins DAF or HRF, which normally function to protect a person's own cell surfaces from complement activation, but when deficient result in the destruction of host red blood cells resulting in the disease paroxysmal nocturnal hemoglobinuria. Deficiencies in C1-inhibitor causes the disease hereditary angioneurotic edema which is a result of the unregulated activity of serine proteinase enzymes including the complement components C1r and C1s, as well as other serine proteinases such as factor XIIa and kallikrein. The result of the unregulated activity of these serine proteinases is the production of a variety of vasoactive mediators, such as C2 kinin that is produced by the activity of C1s and C2a, resulting in fluid accumulation in the tissues and epiglottal swelling that can lead to suffocation.

C. Proteases

[0327] Provided herein are proteases and methods of using the proteases to cleave (thereby inactivating) proteins involved in disease processes. Typically, a protease provided herein is a non-complement protease that does not normally participate in the complement pathways. Exemplary proteases provided herein cleave any one or more proteins or components of the complement pathway and allelic variants thereof. Cleavage of a complement protein can be an activating cleavage whereby the activity of the complement pathway is enhanced, such as by cleavage of a zymogen to an activated form of a protease or cleavage of a complement protein into its cleavage effector molecules. Cleavage of a complement protein also can be an inhibitory cleavage whereby the activity of the complement protein is diminished. Provided herein are proteases that cleave a complement protein in an inhibitory manner, thereby inhibiting complement activation of any one or more of the complement pathways. The proteases provided herein can be used for modulating complement activation. A protease provided herein can cleave any one or more complement proteins in vitro or in vivo thereby affecting complement activation in vitro or in vivo.

[0328] A protease can be any portion of a full-length protease as long as the portion of the protease retains proteolytic activity. For example, a protease can include only the protease domain of a polypeptide or any catalytically active portion thereof. The protease domain can include a single chain protease domain thereof and can be a fusion protein or a conjugate as long as the resulting fusion protein or conjugate retains proteolytic activity.

[0329] If a protease, or portion thereof, recognizes a substrate sequence within a target protein or proteins, such as for example a complement protein, (i) that would alter the function i.e. by inactivation of the target protein(s) upon catalysis of peptide bond hydrolysis, and (ii) the target proteins(s) is a point of molecular intervention for a particular disease or diseases, than the engineered protease has a therapeutic effect via a proteolysis-mediated inactivation event. Complement activities that can be altered include, but are not limited to, hemolysis of red blood cells and/or the generation of effector complement cleavage products such as but not limited to C3a, C3b, C4a, C5a, C5b-9, and Bb. Biological activities of complement can be altered in vitro or in vivo. Generally, a complement activity is altered by a protease at least 0.1, 0.5, 1, 2, 3, 4, 5, or 10 fold compared to the absence of a protease. Typically, a biological activity is altered 10, 20, 50, 100 or 1000 fold or more compared to the activity in the absence of the protease. For purposes herein with reference to complement activity, a protease modulates complement activation or a complement-mediated activity.

[0330] A protease provided herein can be from any one or more of the serine, cysteine, aspartic, metallo-, or threonine classes or proteases. A protease can be tested to determine if it cleaves any one or more of the complement proteins and/or it can be used as a scaffold to make modifications in any one or more of the amino acid residues that modulates specificity towards a target substrate and/or modulates an activity of a target substrate. Exemplary classes of proteases and amino acid determinants that contribute to substrate specificity are described below.

[0331] 1. Classes of Proteases

[0332] Proteases (also referred to as proteinases or peptidases) are protein-degrading enzymes that recognize sequences of amino acids or a polypeptide substrate within a target protein. Upon recognition of the substrate sequence of amino acids, proteases catalyze the hydrolysis or cleavage of a peptide bond within a target protein. Such hydrolysis of a target protein, depending on the location of the peptide bond within the context of the full-length sequence of the target sequence, can inactivate a target. Proteases are classified based on the way they attack the protein, either exo- or endo-proteases. Proteinases or endopeptidases attack inside the protein to produce large peptides. Peptidases or exopeptidases attack ends or fragments of protein to produce small peptides and amino acids. The peptidases are classified on their action pattern: aminopeptidase cleaves amino acids from the amino end: carboxypeptidase cleaves amino acids from the carboxyl end, dipeptidyl peptidase cleaves two amino acids; dipeptidase splits a dipeptide, and tripeptidase cleaves an amino acid from a tripeptide. Most proteases are small from 21,000 to 45,000 Daltons. Many proteases are synthesized and secreted as inactive forms called zymogens and subsequently activated by proteolysis. This changes the architecture of the active site of the enzyme.

[0333] Several distinct types of catalytic mechanisms are used by proteases (Barret et al. (1994) Meth. Enzymol. 244:18-61; Barret et al. (1994) Meth. Enzymol 244:461-486; Barret et al. (1994) Meth. Enzymol. 248:105-120; Barret et al. (1994) Meth. Enzymol. 248:183-228). Based on their catalytic mechanism, the carboxypeptidases are subdivided into serine-, metallo and cysteine-type carboxypeptidases and the endopeptidases are the serine-, cysteine-, aspartic-, threonine- and metalloendopeptidases. Serine peptidases have a serine residue involved in the active center, the aspartic have two aspartic acids in the catalytic center, cysteine-type peptidases have a cysteine residue, threonine-type peptidases have a threonine residue, and metallo-peptidases use a metal ion in the catalytic mechanism. Generally, proteases can be divided into classes based on their catalytic activity such that classes of proteases can include serine, cysteine, aspartic, threonine, or metallo-proteases. The catalytic activity of the proteases is required to cleave a target substrate. Hence, modification of a protease to alter the catalytic activity of a protease could affect (i.e. enhance specificity/selectivity) the ability of a protease to cleave a substrate.

[0334] Each protease has a series of amino acids that lines the active site pocket and makes direct contact with the substrate. Crystallographic structures of peptidases show that the active site is commonly located in a groove on the surface of the molecule between adjacent structural domains, and the substrate specificity is dictated by the properties of binding sites arranged along the groove on one or both sides of the catalytic site that is responsible for hydrolysis of the scissile bond. Accordingly, the specificity of a peptidase is described by the ability of each subsite to accommodate a sidechain of a single amino acid residue. The sites are numbered from the catalytic site, S1, S2 . . . Sn towards the N-terminus of the substrate, and S1′, S2′ . . . Sn′ towards the C-terminus. The residues they accommodate are numbered P1, P2 . . . Pn, and P1′, P2′ . . . Pn′, respectively. The cleavage of a target protein is catalyzed between P1 and P1′ where the amino acid residues from the N to C terminus of the polypeptide substrate are labeled (Pi, . . . , P3, P2, P1, P1′, P2′, P3′, . . . , Pj) and their corresponding binding recognition pockets on the protease are labeled (Si, . . . , S3, S2, S1, S1′, S2′, S3′, . . . , Sj) (Schecter and Berger (1967) Biochem Biophys Res Commun 27:157-162). Thus, P2 interacts with S2, P1 with S1, P1′ with S1′, etc. Consequently, the substrate specificity of a protease comes from the S1-S4 positions in the active site, where the protease is in contact with the P1-P4 residues of the peptide substrate sequences. In some cases, there is little (if any) interaction between the S1-S4 pockets of the active site, such that each pocket appears to recognize and bind the corresponding residue on the peptide substrate sequence independent of the other pockets. Thus, the specificity determinants can be changed in one pocket without affecting the specificity of the other pocket.

[0335] Based upon numerous structures and modeling of family members, surface residues that contribute to extended substrate specificity and other secondary interactions with a substrate have been defined for many proteases including proteases of the serine, cysteine, aspartic, metallo-, and threonine families (see e.g. Wang et al., (2001) Biochemistry 40(34): 10038-46; Hopfner et al., (1999) Structure Fold Des. 7(8):989-96; Friedrich et al. (2002) J Biol Chem. 277(3):2160-8; Waugh et al., (2000) Nat Struct Biol. 7(9):762-5; Cameron et al., (1993) J Biol Chem. 268:11711; Cameron et al., (1994) J Biol Chem. 269: 11170). A protease can be tested to determine if it cleaves any one or more of the complement proteins and/or it can be used as a scaffold to make modifications in any one or more of the amino acid residues that modulates specificity towards a complement protein target substrate and/or modulates an activity of a complement protein target substrate. To make a modified protease with an altered substrate recognition profile, the amino acids in the three-dimensional structure that contribute to the substrate selectivity (specificity determinants) can be targeted for mutagenesis. Exemplary proteases include, but are not limited to, any protease such as a serine, cysteine, aspartic, metallo-, or threonine protease as described below and provided herein.

[0336] a. Serine Proteases

[0337] Serine proteases (SPs), which include secreted enzymes and enzymes sequestered in cytoplasmic storage organelles, have a variety of physiological roles, including roles in blood coagulation, wound healing, digestion, immune responses and tumor invasion and metastasis. For example, chymotrypsin, trypsin, and elastase function in the digestive tract; Factor 10, Factor 11, Thrombin, and Plasmin are involved in clotting and wound healing; and C1r, C1s, and the C3 convertases play a role in complement activation as discussed above.

[0338] A class of cell surface proteins designated type II transmembrane serine proteases are proteases which are membrane-anchored proteins with extracellular domains. As cell surface proteins, they play a role in intracellular signal transduction and in mediating cell surface proteolytic events. Other serine proteases are membrane bound and function in a similar manner. Others are secreted. Many serine proteases exert their activity upon binding to cell surface receptors, and hence, act at cell surfaces. Cell surface proteolysis is a mechanism for the generation of biologically active proteins that mediate a variety of cellular functions.

[0339] Serine proteases, including secreted and transmembrane serine proteases, are involved in processes that include neoplastic development and progression. While the precise role of these proteases has not been fully elaborated, serine proteases and inhibitors thereof are involved in the control of many intra- and extracellular physiological processes, including degradative actions in cancer cell invasion and metastatic spread, and neovascularization of tumors that are involved in tumor progression. Proteases are involved in the degradation and remodeling of extracellular matrix (ECM) and contribute to tissue remodeling, and are necessary for cancer invasion and metastasis. The activity and/or expression of some proteases have been shown to correlate with tumor progression and development.

[0340] The activity of proteases in the serine protease family is dependent on a set of amino acid residues that form their active site. One of the residues is always a serine; hence their designation as serine proteases. For example, chymotrypsin, trypsin, and elastase share a similar structure and their active serine residue is at the same position (Ser-195) in all three. Despite their similarities, they have different substrate specificities; they cleave different peptide bonds during protein digestion. For example, chymotrypsin prefers an aromatic side chain on the residue whose carbonyl carbon is part of the peptide bond to be cleaved (R-group colored blue below). Trypsin prefers a positively charged Lys or Arg residue at this position. Serine proteases differ markedly in their substrate recognition properties: some are highly specific (i.e. the proteases involved in blood coagulation and the immune complement system); some are only partially specific (i.e. the mammalian digestive proteases trypsin and chymotrypsin); and others, like subtilisin, a bacterial protease, are completely non-specific. Despite these differences in specificity, the catalytic mechanism of serine proteases is well conserved.

[0341] The mechanism of cleavage of a target protein by a serine protease is based on nucleophilic attack of the targeted peptidic bond by a serine. Cysteine, threonine or water molecules associated with aspartate or metals also can play this role. In many cases the nucleophilic property of the group is improved by the presence of a histidine, held in a “proton acceptor state” by an aspartate. Aligned side chains of serine, histidine and aspartate build the catalytic triad common to most serine proteases. For example, the active site residues of chymotrypsin, and serine proteases that are members of the same family as chymotrypsin, such as for example MT-SP1, are Asp102, His57, and Ser195. Over 20 families (denoted S1-S27) of serine protease have been identified, these being grouped into 6 clans (SA, SB, SC, SE, SF and SG) on the basis of structural similarity and other functional evidence (Rawlings N D et al. (1994) Meth. Enzymol. 244: 19-61). There are similarities in the reaction mechanisms of several serine peptidases. Chymotrypsin, subtilisin and carboxypeptidase C clans have a catalytic triad of serine, aspartate and histidine in common: serine acts as a nucleophile, aspartate as an electrophile, and histidine as a base. The geometric orientations of the catalytic residues are similar between families, despite different protein folds. The linear arrangements of the catalytic residues commonly reflect clan relationships. For example the catalytic triad in the chymotrypsin clan (SA) is ordered HDS, but is ordered DHS in the subtilisin clan (SB) and SDH in the carboxypeptidase clan (SC).

[0342] Throughout the chymotrypsin family of serine proteases, the backbone interaction between the substrate and enzyme is completely conserved, but the side chain interactions vary considerably. The identity of the amino acids that contain the S1-S4 pockets of the active site determines the substrate specificity of that particular pocket. Grafting the amino acids of one serine protease to another of the same fold modifies the specificity of one to the other. Typically, the amino acids of the protease that contain the S1-S4 pockets are those that have side chains within 4 to 5 angstroms of the substrate. The interactions these amino acids have with the protease substrate are generally called “first shell” interactions because they directly contact the substrate. There, however, can be “second shell” and “third shell” interactions that ultimately position the first shell amino acids. First shell and second shell substrate binding effects are determined primarily by loops between beta-barrel domains. Because these loops are not core elements of the protein, the integrity of the fold is maintained while loop variants with novel substrate specificities can be selected during the course of evolution to fulfill necessary metabolic or regulatory niches at the molecular level. Typically for serine proteases, the following amino acids in the primary sequence are determinants of specificity: 195, 102, 57 (the catalytic triad); 189, 190, 191, 192, and 226 (S1); 57, the loop between 58 and 64, and 99 (S2); 192, 217, 218 (S3); the loop between Cys168 and Cys180, 215, and 97 to 100 (S4); and 41 and 151 (S2′), based on chymotrypsin numbering, where an amino acid in an S1 position affects P1 specificity, an amino acid in an S2 position affects P2 specificity, an amino acid in the S3 position affects P3 specificity, and an amino acid in the S4 position affects P4 specificity. Position 189 in a serine protease is a residue buried at the bottom of the pocket that determines the S1 specificity. Structural determinants for various serine proteases are listed in Table 9 with numbering based on the to the numbering of mature chymotrypsin, with protease domains for each of the designated proteases aligned with that of the protease domain of chymotrypsin. The number underneath the Cys168-Cys182 and 60's loop column headings indicate the number of amino acids in the loop between the two amino acids and in the loop. The yes/no designation under the Cys191-Cys220 column headings indicates whether the disulfide bridge is present in the protease. These regions are variable within the family of chymotrypsin-like serine proteases and represent structural determinants in themselves. Modification of a protease to alter any one or more of the amino acids in the S1-S4 pocket affect the specificity or selectivity of a protease for a target substrate.

TABLE 9
The structural determinants for various serine proteases
Residues that Determine Specificity

| | S4 | | | | | | | S2 | | | S1 | | | |
|---|---|---|---|---|---|---|---|---|---|---|---|---|---|---|
| | | | | | Cys168 | S3 | | | | 60's | | | | Cys191 |
| | 171 | 174 | 180 | 215 | Cys182 | 192 | 218 | 99 | 57 | loop | 189 | 190 | 226 | Cys220 |
| Granzyme B | Leu | Tyr | Glu | Tyr | 14 | Arg | Asn | Ile | His | 6 | Gly | Ser | Arg | No |
| Granzyme A | Asn | Val | Met | Phe | 17 | Asn | Leu | Arg | His | 7 | Asp | Ser | Gly | Yes |
| Granzyme M | Arg | Ser | Met | Phe | 15 | Lys | Arg | Leu | His | 8 | Ala | Pro | Pro | Yes |
| Cathepsin G | Phe | Ser | Gln | Tyr | 13 | Lys | Ser | Ile | His | 6 | Ala | Ala | Glu | No |
| MT-SP1 | Leu | Gln | Met | Trp | 13 | Gln | Asp | Phe | His | 16 | Asp | Ser | Gly | Yes |
| Neutrophil | — | — | — | Tyr | 5 | Phe | Gly | Leu | His | 10 | Gly | Val | Asp | Yes |
| elastase | | | | | | | | | | | | | | |
| Chymase | Phe | Arg | Gln | Tyr | 12 | Lys | Ser | Phe | His | 6 | Ser | Ala | Ala | No |
| Alpha- | Tyr | Ile | Met | Trp | 22 | Lys | Glu | Ile | His | 9 | Asp | Ser | Gly | Yes |
| tryptase | | | | | | | | | | | | | | |
| Beta- | Tyr | Ile | Met | Trp | 22 | Gln | Glu | Val | His | 9 | Asp | Ser | Gly | Yes |
| tryptase(I) | | | | | | | | | | | | | | |
| Beta- | Tyr | Ile | Met | Trp | 22 | Lys | Glu | Thr | His | 9 | Asp | Ser | Gly | Yes |
| tryptase | | | | | | | | | | | | | | |
| (II) | | | | | | | | | | | | | | |
| Chymo- | Trp | Arg | Met | Trp | 13 | Met | Ser | Val | His | 7 | Ser | Ser | Gly | Yes |
| trypsin | | | | | | | | | | | | | | |
| Easter | Tyr | Ser | Gln | Phe | 16 | Arg | Thr | Gln | His | 14 | Asp | Ser | Gly | Yes |
| Collagenase | Tyr | Ile | — | Phe | 12 | Asn | Ala | Ile | His | 8 | Gly | Thr | Asp | Yes |
| Factor Xa | Ser | Phe | Met | Trp | 13 | Gln | Glu | Tyr | His | 8 | Asp | Ala | Gly | Yes |
| Protein C | Met | asn | Met | Trp | 13 | Glu | Glu | Thr | His | 8 | Asp | Ala | Gly | Yes |
| Plasma | Tyr | Gln | Met | Tyr | 13 | Arg | Pro | Phe | His | 11 | Asp | Ala | Ala | Yes |
| kallikrein | | | | | | | | | | | | | | |
| Plasmin | Glu | Arg | Glu | Trp | 15 | Gln | Leu | Thr | His | 11 | Asp | Ser | Gly | Yes |
| Trypsin | Tyr | Lys | Met | Trp | 13 | Gln | Tyr | Leu | His | 6 | Asp | Ser | Gly | Yes |
| Thrombin | Thr | Ile | Met | Trp | 13 | Glu | Glu | Leu | His | 16 | Asp | Ala | Gly | Yes |
| tPA | Leu | Thr | Met | Trp | 15 | Gln | Leu | Tyr | His | 11 | Asp | Ala | Gly | Yes |
| uPA | His | Ser | Met | Trp | 15 | Gln | Arg | His | His | 11 | Asp | Ser | Gly | yes |

[0343] i. MT-SP1

[0344] Exemplary of the scaffold protease contemplated for use in modulating complement activation or as a scaffold for further modification to increase its activity in modulating the complement pathway is membrane-type serine protease MT-SP1 (also called matriptase, TADG-15, suppressor of tumorigenicity 14, ST14); see SEQ ID NOS: 1, 2 and GenBank Accession Nos: AF118224 and AAD42765; (1999) J. Biol. Chem. 274:18231-18236; U.S. Pat. No. 5,792,616; see, also Takeuchi (1999) Proc. Natl. Acad. Sci. U.S.A. 96:11054-1161. The protein designated herein as an exemplary scaffold is a 855 amino acid MT-SP1 protease (see SEQ ID NOS: 1 and 2). The nucleic acid molecule whose sequence is set forth in SEQ ID NO: 1 (see, also Genbank AF118224) encodes the 855 amino acid MT-SP1 (SEQ ID NO: 2, GenBank AAD42765).

[0345] It is multidomain proteinase with a C-terminal serine proteinase domain (Friedrich et al. (2002) J Biol Chem 277(3):2160). A 683 amino acid variant of the protease has been isolated, but this protein appears to be a truncated form or an ectodomain form.

[0346] MT-SP1 is highly expressed or active in prostate, breast, and colorectal cancers and it may play a role in the metastasis of breast and prostate cancer. MT-SP1 also is expressed in a variety of epithelial tissues with high levels of activity and/or expression in the human gastrointestinal tract and the prostate. Other species of MT-SP1 are known. For example, a mouse homolog of MT-SP1 has been identified and is called epithin.

[0347] MT-SP1 contains a transmembrane domain, two CUB domains, four LDLR repeats, and a serine protease domain (or peptidase S1 domain) between amino acids 615-854 (set forth as SEQ ID NOS:9 and 10), which is highly conserved among all members of the peptidase S1 family of serine proteases, such as for example with chymotrypsin (SEQ ID NOS:7 and 8). MT-SP1 is synthesized as a zymogen, and activated to double chain form by cleavage. In addition, the single chain proteolytic domain alone is catalytically active and functional.

[0348] MT-SP1 belongs to the peptidase S1 family of serine proteases (also referred to as the chymotrypsin family), which also includes chymotrypsin and trypsin. Generally, chymotrypsin family members share sequence and structural homology with chymotrypsin. MT-SP1 is numbered herein according to the numbering of mature chymotrypsin, with its protease domain aligned with that of the protease domain of chymotrypsin and its residues numbered accordingly. Based on chymotrypsin numbering, active site residues are Asp102, His57, and Ser195. The linear amino acid sequence can be aligned with that of chymotrypsin and numbered according to the β sheets of chymotrypsin. Insertions and deletions occur in the loops between the beta sheets, but throughout the structural family, the core sheets are conserved. The serine proteases interact with a substrate in a conserved beta sheet manner. Up to 6 conserved hydrogen bonds can occur between the substrate and enzyme. All serine proteases of the chymotrypsin family have a conserved region at their N-terminus of the protease domain that is necessary for catalytic activity (i.e. IIGG, VVGG, or IVGG, where the first amino acid in this quartet is numbered according to the chymotrypsin numbering and given the designation Ile16. This numbering does not reflect the length of the precursor sequence).

[0349] The substrate specificity of MT-SP1 in the protease domain has been mapped using a positional scanning synthetic combinatorial library and substrate phage display (Takeuchi et al. (2000) J Biol Chem 275: 26333). Cleavage residues in substrates recognized by MT-SP1 contain Arg/Lys at P4 and basic residues or Gln at P3, small residues at P2, Arg or Lys at P1, and Ala at P1′. Effective substrates contain Lys-Arg-Ser-Arg in the P4 to P1 sites, respectively. Generally, the substrate specificity for MT-SP1 reveals a trend whereby if P3 is basic, then P4 tends to be non-basic; and if P4 is basic, then P3 tends to be non-basic. Known substrates for MT-SP1, including, for example, proteinase-activated receptor-2 (PAR-2), single-chain uPA (sc-uPA), the proform of MT-SP1, and hepatocyte growth factor (HGF), conform to the cleavage sequence for MT-SP1 specific substrates.

[0350] MT-SP1 can cleave selected synthetic substrates as efficiently as trypsin, but exhibit a more restricted specificity for substrates than trypsin. The catalytic domain of MT-SP1 has the overall structural fold of a (chymo)trypsin-like serine protease, but displays unique properties such as a hydrophobic/acidic S2/S4 subsites and an exposed 60 loop. Similarly, MT-SP1 does not indiscriminately cleave peptide substrates at accessible Lys or Arg residues, but requires recognition of additional residues surrounding the scissile peptide bond. This requirement for an extended primary sequence highlights the specificity of MT-SP1 for its substrates. For example, although MT-SP1 cleaves proteinase activated receptor-2 (PAR-2) (displaying a P4 to P1 target sequence of Ser-Lys-Gly-Arg), the enzyme does not activate proteins closely related to this substrate such as PAR-1, PAR-3, and PAR-4 that do not display target sequences matching the extended MT-SP1 specificity near the scissile bond (see Friedrich et al. (2002) J Biol Chem 277: 2160).

[0351] The protease domain of MT-SP1 (see, e.g, SEQ ID NOS: 9 and 10) is composed of a pro-region and a catalytic domain. The catalytically active portion of the polypeptide begins after the autoactivation site at amino acid residue 611 of the mature protein (see, e.g., SEQ ID NOS: 1 and 2 at RQAR followed by the residues VVGG). The S1 pocket of MT-SP1 and trypsin are similar with good complementarity for Lys as well as Arg P1 residues, thereby accounting for some similarities in substrate cleavage with trypsin. The accommodation of the P1-Lys residues is mediated by Ser¹⁹⁰ whose side chain provides an additional hydrogen bond acceptor to stabilize the buried α-ammonium group (see Friedrich et al. (2002) J Biol Chem 277: 2160). The S2 pocket is shaped to accommodate small to medium-sized hydrophobic side chains of P2 amino acids and generally accepts a broad range of amino acids at the P2 position. Upon substrate binding, the S2 sub-site is not rigid as evidenced by the rotation of the Phe⁹⁹ benzyl group. Association of the substrate amino acids at positions P3 (for either Gln or basic residues) and P4 (for Arg or Lys residues) appears to be mediated by electrostatic interactions in the S3 and S4 pockets with the acidic side chains of Asp-217 and/or Asp-96 which could favorably pre-orient specific basic peptide substrates as they approach the enzyme active site cleft. The side chain of a P3 residue also is able to hydrogen bond the carboxamide group of Gln¹⁹² or alternatively, the P3 side chain can extend into the S4 sub-site to form a hydrogen bond with Phe⁹⁷ thereby weakening the inter-main chain hydrogen bonds with Gly²¹⁶. In either conformation, a basic P3 side chain is able to interact favorably with the negative potential of the MT-SP1 S4 pocket. The mutual charge compensation and exclusion from the same S4 site explains the low probability of the simultaneous occurrence of Arg/Lys residues at P3 and P4 in good MT-SP1 substrates. Generally, the amino acid positions of MT-SP1 (based on chymotrypsin numbering) that contribute to extended specificity for substrate binding include: 146 and 151 (S1′); 189, 190, 191, 192, 216, 226 (S1); 57, 58, 59, 60, 61, 62, 63, 64, 99 (S2); 192, 217, 218, 146 (S3); 96, 97, 98, 99, 100, 168, 169, 170, 170A, 171, 172, 173, 174, 175, 176, 178. 179, 180, 215, 217, 224 (S4). Table 10 summarizes the residues in MT-SP1 for some of the amino acid positions important for specificity interactions with a targeted substrate. Typically, modification of an MT-SP1 protease to alter any one or more of the amino acids in the extended specificity binding pocket or other secondary sites of interaction affect the specificity or selectivity of a protease for a target substrate.

TABLE 10
Structural determinants for MT-SP1 substrate cleavage
Residues that Determine Specificity

| S4 | | | | | | | S2 | | | S1 | | | |
|---|---|---|---|---|---|---|---|---|---|---|---|---|---|
| | | | | Cys168 | S3 | | | | 60's loop | | | | Cys191 |
| 171 | 174 | 180 | 215 | Cys182 | 192 | 218 | 99 | 57 | (58-64) | 189 | 190 | 226 | Cys220 |
| Leu | Gln | Met | Trp | 13 | Gln | Asp | Phe | His | 16 | Asp | Ser | Gly | yes |

[0352] ii. Granzyme B

[0353] Granzyme B also is exemplary of the scaffold proteases contemplated for use in modulating complement activation or for further modification to increase its activity in modulating a complement pathway. Granzyme B is a serine protease (S1-type) necessary for target cell lysis in cell-mediated immune responses. Granzyme B is linked to an activation cascade of caspases (aspartate-specific cysteine proteases) responsible for apoptosis execution and cleaves caspase-3, caspase-7, caspase-9 and caspase-10 to give rise to active enzymes mediating apoptosis. Granzyme B (SEQ ID NO:3, GenBank #:M17016) encodes a 247 amino acid polypeptide (SEQ ID NO: 4, GenBank #:P10144). The precursor granzyme B polypeptide has a signal sequence and propeptide activation peptide at amino acids 1 to 20. The mature granzyme B protein is characterized by a peptidase S1 or protease domain at amino acids 21-245.

[0354] Granzyme B is a member of the family of chymotrypsin fold serine proteases, and has greater than 50% identity to other members of the granzyme family including granzymes C-G, cathepsin G, and rat mast cell protease II. The protein is a sandwich of two six stranded, anti-parallel beta-barrel domains connected by a short alpha-helix.

[0355] A substrate cleavage site of wildtype granzyme B has a consensus recognition site of I/V (P4)-E/Q/M (P3)-P/T (P2)-D (P1). These amino acids line the P1-P4 pocket of the substrate for recognition and cleavage by granzyme B. Generally granzyme B has a preference for cleaving after Asp in its consensus recognition.

[0356] The structural determinants for granzyme B substrate cleavage have been identified by the three-dimensional structure of rat granzyme B (SEQ ID NOS: 5 and 6) in complex with ecotin (IEPD), a macromolecular inhibitor with a substrate-like binding loop (Waugh et al., (2000) Nature Struct. Biol 7:762). The catalytic triad is composed of Asp102, His57 and Ser195. The surface loops are numbered according to the additions and deletions compared to alpha-chymotrypsin and represent the most variable regions of this structural family. Other structural determinants of specificity include Lys 41, Ile99, Arg192, Asn218, Tyr215, Tyr174, Leu172, Arg226, and Tyr151, by chymotrypsin numbering. The other members of the granzyme family of serine proteases share only two of these amino acids with granzyme B. They are Tyr215 and Leu172, two residues that vary very little across the entire structural family. This indicates that while the sequence identity of the granzymes is high, their substrate specificities are very different. The structural determinants for granzyme B substrate specificity are listed in Table 11 with chymotrypsin numbering. Typically, modification of a granzyme B protease to alter any one or more of the amino acids in the extended specificity binding pocket, or other secondary sites of interactions, affects the specificity or selectivity of a protease for a target substrate including a complement protein target substrate.

TABLE 11
Structural determinants for Granzyme B substrate cleavage
Residues that Determine Specificity

| S4 | | | | | | | S2 | | | S1 | | | |
|---|---|---|---|---|---|---|---|---|---|---|---|---|---|
| | | | | Cys¹⁶⁸ | S3 | | | | 60's | | | | Cys¹⁹¹ |
| 171 | 174 | 180 | 215 | Cys¹⁸² | 192 | 218 | 99 | 57 | loop | 189 | 190 | 226 | Cys²²⁰ |
| Leu | Tyr | Glu | Tyr | 14 | Arg | Asn | Ile | His | 6 | Gly | Ser | Arg | no |

[0357] The importance of granzyme B structural determinants to specificity has been profiled using a combinatorial substrate library to determine the effect of a mutation on extended specificity. Mutation of Ile99, Arg192, Asn218 and Tyr174 to the amino acid alanine have shown that Ile99 contributes to P2 specificity, Asn218 and Arg192 to P3 specificity, and Tyr174 to P4 specificity. Since the P1 specificity of a protease represents the majority of its specificity, the modifications do not destroy unique specificity of granzyme B towards P1 aspartic acid amino acids but modulate specificity in the extended P2 to P4 sites. For the P3 and P4 subsites, mutations at Tyr174, Arg192 and Asn218 did not significantly affect the specificity. Y174A increases the activity towards Leu at P4, but the rest of the amino acids continue to be poorly selected. R192A and N218A both broaden the specificity at P3. Instead of a strong preference for glutamic acid, Ala, Ser, Glu and Gin are introduced into a modified protease. The overall activity (k_{cat}/Kₘ) of the mutant is less than 10% below the wild-type activity toward an ideal wild-type substrate, N-acetyl-Ile-Glu-Pro-Asp-AMC (7-amino-4-methylcoumarin) (Ac-IEPD-AMC). A greater effect is observed at the P2 subsite. In wildtype granzyme B, the preference is broad with a slight preference for Pro residues. I99A narrows the P2 specificity to Phe and Tyr residues. Phe narrows specificity by nearly 5 times over the average activity of other amino acids at this position. Within the chymotrypsin family of serine proteases, more than a dozen proteases have a small residue at this structural site, either an asparagine, serine, threonine, alanine or glycine. From this group, two proteases have been profiled using combinatorial substrate libraries, (plasma kallikrein and plasmin), and both show strong preferences towards Phe and Tyr. These two results suggest that any serine protease that is mutated to an Asn, Ser, Thr, Gly or Ala at position 99 will show the same hydrophobic specificity found in plasma kallikrein, plasmin and the I99A granzyme B mutant.

[0358] P2 specificity determinants can be expanded to the contrasting mutation and substrate preference. For example, nearly two dozen chymotrypsin-fold serine proteases have an aromatic amino acid at position 99. Four of these proteases have been profiled using combinatorial substrate libraries: human granzyme B, tissue type plasminogen activator, urokinase type plasminogen activator, and membrane type serine protease 1. All but granzyme B have a preference for serine, glycine and alanine amino acids at the substrate P2 position.

[0359] b. Cysteine Proteases

[0360] Cysteine proteases have a catalytic mechanism that involves a cysteine sulfhydryl group. Deprotonation of the cysteine sulfhydryl by an adjacent histidine residue is followed by nucleophilic attack of the cysteine on the peptide carbonyl carbon. A thioester linking the new carboxy-terminus to the cysteine thiol is an intermediate of the reaction (comparable to the acyl-enzyme intermediate of a serine protease). Cysteine proteases include papain, cathepsin, caspases, and calpains.

[0361] Papain-like cysteine proteases are a family of thiol dependent endo-peptidases related by structural similarity to papain. They form a two-domain protein with the domains labeled R and L (for right and left) and loops from both domains form a substrate recognition cleft. They have a catalytic triad made up of the amino acids Cys25, His159, and Asn175. Unlike serine proteases which recognize and proteolyze a target peptide based on a beta-sheet conformation of the substrate, this family of proteases does not have well-defined pockets for substrate recognition. The main substrate recognition occurs at the P2 amino acid (compared to the P1 residue in serine proteases).

[0362] The substrate specificity of a number of cysteine proteases (human cathepsin L, V, K, S, F, B, papain, and cruzain) has been determined using a complete diverse positional scanning synthetic combinatorial library (PS-SCL). The complete library contains P1, P2, P3, and P4 tetrapeptide substrates in which one position is held fixed while the other three positions are randomized with equal molar mixtures of the 20 possible amino acids, giving a total diversity of ˜160,000 tetrapeptide sequences.

[0363] Overall, P1 specificity is almost identical between the cathepsins, with Arg and Lys being strongly favored while small aliphatic amino acids are tolerated. Much of the selectivity is found in the P2 position, where the human cathepsins are strictly selective for hydrophobic amino acids. Interestingly, P2 specificity for hydrophobic residues is divided between aromatic amino acids such as Phe, Tyr, and Trp (cathepsin L, V), and bulkly aliphatic amino acids such as Val or Leu (cathepsin K, S, F). Compared to the P2 position, selectivity at the P3 position is significantly less stringent. Several of the proteases, however, have a distinct preference for proline (cathepsin V, S, and papain), leucine (cathepsin B), or arginine (cathepsin S, cruzain). The proteases show broad specificity at the P4 position, as no one amino acid is selected over others.

[0364] The S2 pocket is the most selective and best characterized of the protease substrate recognition sites. It is defined by the amino acids at the following spatial positions (papain numbering): 66, 67, 68, 133, 157, 160, and 205. Position 205 plays a role similar to position 189 in the serine proteases—a residue buried at the bottom of the pocket that determines the specificity. The other specificity determinants include the following amino acids (numbering according to papain): 61 and 66 (S3); 19, 20, and 158 (S1). The structural determinant for various cysteine proteases are listed in Table 12. Typically, modification of a cysteine protease, such as for example a papain protease, to alter any one or more of the amino acids in the extended specificity binding pocket or other secondary sites of interaction affect the specificity or selectivity of a protease for a target substrate including a complement protein target substrate.

TABLE 12
The structural determinants for various cysteine proteases
Residues that Determine Specificity

| | Active Site | | | | | | | | | | | | |
|---|---|---|---|---|---|---|---|---|---|---|---|---|---|
| | Residues | | | S3 | | S2 | | | | | S1 | | |
| | 25 | 159 | 175 | 61 | 66 | 66 | 133 | 157 | 160 | 205 | 19 | 20 | 158 |
| Cathepsin L | Cys | His | Asn | Glu | Gly | Gly | Ala | Met | Gly | Ala | Gln | Gly | Asp |
| Cathepsin V | Cys | His | Asn | Gln | Gly | Gly | Ala | Leu | Gly | Ala | Gln | Lys | Asp |
| Cathepsin K | Cys | His | Asn | Asp | Gly | Gly | Ala | Leu | Ala | Leu | Gln | Gly | Asn |
| Cathepsin S | Cys | His | Asn | Lys | Gly | Gly | Gly | Val | Gly | Phe | Gln | Gly | Asn |
| Cathepsin F | Cys | His | Asn | Lys | Gly | Gly | Ala | Ile | Ala | Met | Gln | Gly | Asp |
| Cathepsin B | Cys | His | Asn | Asp | Gly | Gly | Ala | Gly | Ala | Glu | Gln | Gly | Gly |
| Papain | Cys | His | Asn | Tyr | Gly | Gly | Val | Val | Ala | Ser | Gln | Gly | Asp |
| Cruzain | Cys | His | Asn | Ser | Gly | Gly | Ala | Leu | Gly | Glu | Gln | Gly | Asp |

[0365] c. Aspartic Proteases

[0366] Aspartate proteases include the digestive enzyme pepsin, some proteases found in lysosomes, the kidney enzyme renin, and the HIV-protease. Two aspartate residues participate in acid/base catalysis at the active site. In the initial reaction, one aspartate accepts a proton from an active site H₂O, which attacks the carbonyl carbon of the peptide linkage. Simultaneously, the other aspartate donates a proton to the oxygen of the peptide carbonyl group. They can exhibit a variety of specificities, but typically cleave between two hydrophobic amino acids. Well defined S4, S3, S2, S1, S1′, S2′, S3′, and S4′ subsite pockets for the amino acid side chains of the substrate are hallmarks for these enzymes (see e.g. Brinkworth et al., (2001) J Biol Chem 276:38844).

[0367] Exemplary aspartic proteases include retroviral proteases, such as the human immunodeficiency virus, type 1 (HIV-1) PR, or the avian myeloblastosis/Rous sarcoma virus (AMV/RSV) PR (Cameron et al., (1993) J Biol Chem. 268:11711). The PRs possess substrate binding pockets that contain at least seven subsites (S4-S3′) which interact with 7 amino acids of the substrate (P4-P3′) (Cameron et al., (1993) J Biol Chem. 268:11711; Cameron et al., (1994) J Biol Chem. 269: 11170). Residues that contribute to substrate specificity of the AMV/RSV PR include P62, I42, M73, R105′, H7′, Q63, R10′, D41, I64 (S4); H65, V104′, R105′, G106′, Q63, R10′, L35′, D37′, G39, D41, G66, I67, I108′, R111 (S3); I42, I44, H65, M73, A100, A40, D41, I64, G66, I67′, I108 (S2); H65, V104′, R105′, G106′, S107′, R10′, L35′, D37′, D37, G39, G66, I67, I108′ (S1); H65′, V104, R105, G106, S107, R10, L35, D37, D37′, G39′, G66′, I67′, I108 (S1′), I42′, I44′, H65′, M73′, A100′, V104′, A40′, D41′, I64′, G66′, I67, I108′ (S2′); and S38′, H65′, V104, R105, G106, Q63′, R10, L35, G39′, D41′, I64′, G66′, I67′, I108, R111′ (S3′), where the amino acid residues in the second subunit of the dimer are indicated by a prime. Residues that contribute to substrate specificity of the HIV-1 PR include D30, V56, P81′, R8′, D29, I47 (S4); G48, T80′, P81′ V82′, R8′, L23′, D25′, G27, D29, G49, I50, I84′, R87 (S3); D30, V32, G48, V56, L76, A28, D29, I47, G49, I50′, I84 (S2); G48, T80′, P81′, V82′, N83′, R8′, L23′, D25′, D25, G27, G49, I50, I84′ (S1); G48′, T80, P81, V82, N83, R8, L23, D25, D25′, G27′, G49′, I50′, I84 (S1′); D30′, V32′, G48′, V56′, L76′, T80′ (S2′); and R8, L23, G27′, D29′, I47′, G49′, I50′, I84, R87′ (S3′), where the amino acid residues in the second subunit of the dimer are indicated by a prime. Typically, modification of an aspartic protease, such as for example a retroviral protease, to alter any one or more of the amino acids in the extended specificity binding pocket, or other secondary sites of interaction, affects the specificity or selectivity of a protease for a target substrate including a complement protein target substrate.

[0368] d. Metalloproteases

[0369] Metalloproteases (also called Zinc proteases) include the digestive enzymes carboxypeptidases, various matrix metalloproteases (MMPs) that are secreted by cells, ADAMs (a disintegrin and metalloprotease domain), and lysosomal proteases. These enzymes, including ADAMs and MMPs have roles in embryonic development, cell growth and proliferation, inflammatory responses, wound repair, multiple sclerosis, arthritis, and cancer progression and metastasis (Manzetti et al., (2003) J of Computer-Aided Mol. Design, 17: 551). Some MMPs (e.g., collagenase) are involved in degradation of the extracellular matrix during tissue remodeling. For example, many of these enzymes can cleave components of the basement membrane and extracellular matrix. Some MMPs have roles in cell signaling relating to their ability to release cytokines or growth factors, such as TNFα, TGFβ, and interleukins, from the cell surface by cleavage of membrane-bound pre-proteins.

[0370] A zinc binding motif at the active site of a metalloprotease includes two histidine residues whose imidazole side-chains are ligands to the Zn⁺⁺. During catalysis, the Zn⁺⁺ promotes nucleophilic attack on the carbonyl carbon by the oxygen atom of a water molecule at the active site. An active site base (a glutamate residue in carboxypeptidase) facilitates this reaction by extracting a proton from the attacking water molecule. Generally, these enzymes have a common zinc binding motif (HExxHxxGxxH) in their active site, and a conserved methionine turn following the active site. Mutation of any one of the histidines ablates catalytic activity. The active site specificity differs between metalloproteases to accommodate different peptide backbones of substrates around the scissile bond. A crucial molecular determinant of MMP substrate specificity is the side chain of the amino acid at the P1′ position. Thus, the S1′ subsite is important in determining the peptide bond preference for cleavage. For example, the small S1′ pocket of MMP-1 and MMP-7 promotes a preference for small hydrophobic residues while other MMPs have large S1′ pockets (Overall et al., (2002) Mol Biotech 22:51). The S2 position also is a molecular determinant of specificity. For example, between MMP-2 and MMP-9, the S2 sub-site is one of the few differences between the catalytic clefts of the MMPs where the presence of Glu⁴¹² in MMP-2 versus Asp⁴¹⁰ in MMP-9 play important roles in altering substrate specificity. In fact, among the larger MMP family the Glu⁴¹² position is highly variable where it is occupied by acidic residues, large hydrophobic residues, and even glycine. In contrast, most of the residues surrounding the S2 subsite are strictly conserved among all MMPs (Chen et al., (2003) J Biol Chem 278:17158). Other molecular determinants of specificity are described in Table 13 below (see e.g., Manzetti et al., (2003) J Computer-Aided Mol Design 17:551). Typically, modification of a metalloprotease, such as for example a MMP or ADAM protease, to alter any one or more of the amino acids in the extended specificity binding pocket, or other secondary sites of interaction, affect the specificity or selectivity of a protease for a target substrate including a complement protein target substrate.

TABLE 13
The structural determinants for various metalloproteases

| | S4 | S3 | S2 | S1 | S1′ | S2′ | S3′ | S4′ |
|---|---|---|---|---|---|---|---|---|
| MMP-3 | F210 | F210 | H166 | L164 | V163 | L164 | L164 | L222 |
| | F83 | A169 | H211 | V198 | | | | |
| | | | | P221 | | | | |
| ADAM9 | F317 | V318 | V318 | M315 | I344 | N373 | S374 | G310 |
| | V318 | M315 | H351 | H357 | A313 | T312 | F333 | |
| | H357 | | N356 | | N373 | | | |
| ADAM10 | P391 | V332 | V332 | L329 | L327 | V326 | N366 | T421 |
| | V332 | P391 | H392 | H392 | T379 | | | |
| | W331 | N387 | | | A418 | | | |

[0371] e. Threonine

[0372] Threonine proteases include the proteasome hydrolase. The proteasome is a large barrel-shaped protein complex made up of alpha and beta subunits. The beta subunits supply the catalytic machinery found within the two central rings of the complex. Typically, the mechanism of catalysis of the catalytically active beta subunit involves a conserved N-terminal threonine at each active site. The beta subunits become activated when the N-terminus is cleaved off, making threonine the N-terminal residue such that catalytic threonines are exposed at the lumenal surface. Hydrolysis is initiated by attack of an amide bond by the hydroxyl nucleophile on the catalytic machinery. The structural determinants of specificity of the beta subunits of the proteasome have been determined, such as, for example by using libraries of peptide-based covalent inhibitors of the proteasome (see e.g., Groll et al., (2002) Chem Biol 9:655; Zhang et al., (2003) EMBO J, 22:1488).

D. Scaffold Proteins

[0373] Scaffold proteins are provided. Scaffold proteins include any wild-type protease so so long as they are non-complement proteases, and also include allelic or species variants, or catalytically active protions thereof. The scaffold proteases can be used to target (i.e. cleave) any one or more complement pathway substrates. Typically, such cleavage results in inactivation of a complement pathway. In some instances, such cleavage can result in activation of complement. Hence, such scaffold proteases can be used as therapeutics by targeting complement pathway substrates to, for example, inhibit complement activation which is associated with the etiology of various diseases or disorders. Scaffold proteins also are any proteins that can be modified to cleave a target substrate. Among them are scaffold proteases, whose target substrate specificity can be modified. Scaffold proteins, including proteases, can be modified in any one or more amino acids such that the resulting protease exhibits altered specificity or selectivity for any one or more protein components of the complement pathway and/or modulates an activity of a complement protein or pathway. For example, a modified protease can have an altered substrate specificity such that the modified protease preferentially cleaves a targeted substrate component of the complement pathway compared to a non-targeted substrate, such as for example a native substrate of a wildtype scaffold protease. In one embodiment, the specificity can be increased compared to the specificity of a wildtype or scaffold protease for a targeted substrate. In another example, a modified protease can exhibit a selectivity for a complement component such that the ability of a modified protease to cleave a particular substrate is greater than any other target substrate for which the modified protease also can exhibit specificity. Additionally, a modified protease can cleave a target substrate, such as for example any one or more proteins of a complement pathway, and modulate an activity of a complement pathway.

[0374] Exemplary scaffold proteases that can be used to cleave any one or more complement protein or can be used as a template to make modifications in the protease to increase substrate specificity or activity towards any one or more of the complement proteins are described. Protease scaffolds include any non-complement protease that is any one of the serine, cysteine, aspartic, metallo-, or threonine classes of proteases. Exemplary scaffold proteases are listed in Table 14 and described herein. Protease scaffolds include allelic variant and isoform of any one protein, including the scaffold protease polypeptides exemplified in any of SEQ ID NOS: 2, 4, 8, 71, 73, 75, 77, 79, 81, 83, 85, 87, 89, 91, 93, 95, 97, 99, 101, 103, 105, 107, 109, 111, 113, 115, 117, 119, 121, 123, 125, 127, 128, 130, 132, 134, 136, 138, 140, 142, 144, 146, 148, 150, 152, 154, 156, 158, 160, 162, 164, 166, 168, 170, 172, 174, 176, 178, 180, 182, 184, 186, 188, 190, 192, 194, 196, 198, 200, 202, 204, 206, 208, 210, 212, 214, 216, 218, 220, 222, 224, 226, 228, 230, 232, 234, 236, 238, 240, 242, 244, 246, 248, 250, 252, 254, 256, 258, 260, 262, 264, 266, 268, 269, 270, 272, 274, 276, 278, 280, 282, 284, 286, 287, 289, 291, 293, 295, 297, 373, 375, 377, 379, 381, 383, 385, 387, 544,545, 547, 549, and 551.

[0375] A scaffold protein or scaffold protease can be produced or isolated by any method known in the art including isolation from natural sources, isolation of recombinantly produced proteins in cells, tissues and organisms, and by recombinant methods and by methods including in silico steps, synthetic methods and any methods known to those of skill in the art. Table 14 sets forth exemplary scaffold proteases (see also e.g., www.merops.sanger.ac.uk). The sequence identifiers (SEQ ID NO) for the nucleotide sequence and encoded amino acid precursor sequence for each of the exemplary candidate proteases is depicted in the Table. The encoded amino acids corresponding to the signal peptide or propeptide sequence to yield a mature protein also are noted in the Table. In addition, amino acids designating the protease domain (i.e. peptidase unit) also are noted, as are the active site residues that make up, for example, the catalytic triad of the respective protease. Since interactions are dynamic, amino acid positions noted are for reference and exemplification. The noted positions reflects a range of loci that vary by 2, 3, 4, 5 or more amino acids. Variations also exist among allelic variants and species variants. Those of skill in the art can identify corresponding sequences by visual comparison or other comparisons including readily available algorithms and software.

TABLE 14
Exemplary Scaffold Proteases

| | | | | | | | | Peptidase |
|---|---|---|---|---|---|---|---|---|
| | | | | | | | | unit |
| | | | Nucl. AC | | Protein | SEQ ID | Signal/Propep. | (active site |
| Merops Code | Name | Gene | NO: | Synonym | AC NO: | NO: | sequence | residues) |
| S01.010 | granzyme | GZMB | M17016 | HLP, | P10144 | 3, 4 | 1-18/19-20 | 21-247 |
| | B, human- | | | CCPI, | | | | (64, 108, 203) |
| | type | | | CGL1, | | | | |
| | | | | CSPB, | | | | |
| | | | | SECT, | | | | |
| | | | | CGL-1, | | | | |
| | | | | CSP-B, | | | | |
| | | | | CTLA1, | | | | |
| | | | | CTSGL1 | | | | |
| S01.011 | Testisin | PRSS21 | NM_006799 | ESP-1, | NP_006790 | 70, 71 | 1-19/20-41 | 42-288 |
| | | | (v1) | TEST1 | NP_659205 | (V1); 72, | | (82, 137, 238) |
| | | | NM_144956 | | NP_659206 | 73 (V2); | | |
| | | | (v2) | | | 74, 75 | | |
| | | | NM_144957 | | | (V2) | | |
| | | | (v3) | | | | | |
| S01.015 | trypstase | TPSB1 | NM_003294 | TPS1, | NP_003285 | 76, 77 | 1-18/19-30 | 31-274 |
| | beta 1 | | | TPS2, | | | | (74, 121, 224) |
| | (Homo | | | TPSAB1, | | | | |
| | sapiens) | | | alpha II | | | | |
| | (III) | | | | | | | |
| S01.017 | kallikrein | KLK5 | NM_012427 | SCTE, | NP_036559 | 78, 79 | 1-22/ | 67-292 |
| | hk5 | | | KLKL2, | | | | (108, 153, 245) |
| | | | | KLK-L2 | | | | |
| S01.019 | Corin | | NM_006587 | CRN, | NP_006578 | 80, 81 | | 802-1037 |
| | | | | ATC2, | | | | (843, 892, 985) |
| | | | | Lrp4, | | | | |
| | | | | TMPRSS10 | | | | |
| S01.020 | kallikrein | KLK12 | NM_019598 | KLK-L5 | NP_062544 | 82, 83 | 1-17/ | 22-248 |
| | 12 | | (v1) | | NP_665901 | (V1); 84, | | (843, 892, 985) |
| | | | NM_145894 | | NP_665902 | 85 (V2); | | |
| | | | (v2) | | | 86, 87 | | |
| | | | NM_145895 | | | (V3) | | |
| | | | (v3) | | | | | |
| S01.021 | DESC1 | | AF064819 | | AAF04328 | 88, 89 | | 191-422 |
| | oritease | | | | | | | (231, 276, 372) |
| S01.028 | tryptase | TPSG1 | NM_012467 | TMT, | NP_036599 | 90, 91 | 1-19/ | 38-272 |
| | gamma 1 | | | trpA, | | | | (78, 125, 222) |
| | | | | PRSS31 | | | | |
| S01.029 | kallikrein | KLK14 | NM_022046 | KLK-L6 | NP_071329 | 92, 93 | 1-18/19-24 | 25-249 |
| | hK14 | | | | | | | (67, 111, 204) |
| S01.033 | hyaluronan- | HABP2 | NM_004132 | FSAP, | NP_004123 | 94, 95 | 1-23/ | 314-557 |
| | binding | | | HABP, | | | | (362, 411, 509) |
| | serine | | | PHBP, | | | | |
| | protease | | | HGFAL | | | | |
| | (HGF | | | | | | | |
| | activator- | | | | | | | |
| | like protein) | | | | | | | |
| S01.034 | transmembrane | TMPRSS4 | NM_019894 | MT-SP2, | NP_063947 | 96, 97 | | 205-436 |
| | protease, | | (v1) | TMPRSS3 | NP_899070 | (V1); 98, | | (245, 290, 387) |
| | serine 4 | | NM_183247 | | | 99 (V2) | | |
| | | | (v2) | | | | | |
| S01.054 | tryptase | TPSD1 | NM_012217 | MCP7L1, | NP_036349 | 100, 101 | 1-18/19-30 | 31-235 |
| | delta 1 | | | MMCP- | | | | (74, 121, 224) |
| | (Homo | | | 7L, | | | | |
| | sapiens) | | | MGC95428 | | | | |
| S01.074 | Marapsin | | NM_031948 | PRSS27, | NP_114154 | 102, 103 | 1-22/23-34 | 35-279 |
| | | | | CAPH2 | | | | (75, 124, 229) |
| S01.075 | Tryptase | | BC036846 | PRSS33, | AAN04055 | 104, 105 | | 37-281 |
| | homologue | | | EOS | | | | (77, 126, 231) |
| | 2 (Homo | | | | | | | |
| | sapiens) | | | | | | | |
| S01.076 | Tryptase | | Putative | | | 106, 107 | | 67-304 |
| | homologue | | Only | | | | | (107, 213, 259) |
| | 3 (Homo | | AC005570 | | | | | |
| | sapiens) | | (Cosmid | | | | | |
| | | | 407D8) | | | | | |
| S01.077 | tryptase | | | | | | | |
| | chromosome | | | | | | | |
| | 21 (Homo | | | | | | | |
| | sapiens) | | | | | | | |
| S01.079 | transmembrane | TMPRSS3 | NM_024022 | DFNB8, | NP_076927 | 108, 109 | | 217-451 |
| | protease, | | (vA) | DFNB10, | NP_115777 | (VA); 110, | | (257, 304, 401) |
| | serine 3 | | NM_032401 | ECHOS1, | NP_115780 | 111 (vB); | | |
| | | | (vB) | TADG12 | NP_115781 | 112, 113 | | |
| | | | NM_032404 | | | (vC); 114, | | |
| | | | (vC) | | | 115 (vD) | | |
| | | | NM_032405 | | | | | |
| | | | (vD) | | | | | |
| S01.081 | kallikrein | | NM_023006 | ACO, | NP_075382 | 116, 117 | 1-16/17-21 | 22-256 |
| | hK15 | | (v1) | HSRNASPH | NP_612630 | (v1); 118, | | (62, 106, 209) |
| | (Homo | | NM_138563 | | NP_612631 | 119 (v2); | | |
| | sapiens) | | (v2) | | NP_059979 | 120, 121 | | |
| | | | NM_138564 | | | (v3); 122, | | |
| | | | (v3) | | | 123 (v4) | | |
| | | | NM_017509 | | | | | |
| | | | (v4) | | | | | |
| S01.085 | Mername- | | BC035384 | FLJ16649, | AAH35384 | 124, 125 | | 1-241 |
| | AA031 | | | MGC35022, | | | | (56, 101, 195) |
| | peptidase | | | TRYX3, | | | | |
| | (deduced | | | UNQ2540 | | | | |
| | from ESTs | | | | | | | |
| | by | | | | | | | |
| | MEROPS) | | | | | | | |
| S01.087 | membrane- | | AB048796 | | BAB39741 | 126, 127 | | 321-556 |
| | type mosaic | | | | | | | (361, 409, 506) |
| | serine | | | | | | | |
| | protease | | | | | | | |
| S01.088 | mername- | | Putative | | CAC12709 | 128 | | 10-142 |
| | AA038 | | Only | | | | | (50, 101) |
| | peptidase | | AL136097 | | | | | |
| | | | (RP11- | | | | | |
| | | | 62C3 | | | | | |
| | | | clone) | | | | | |
| S01.098 | mername- | | Putative | | AAH41609 | 129, 130 | | 33-202 |
| | AA128 | | Only | | | | | (50, 152) |
| | peptidase | | BC041609 | | | | | |
| | (deduced | | | | | | | |
| | from ESTs | | | | | | | |
| | by | | | | | | | |
| | MEROPS) | | | | | | | |
| S01.127 | cationic | PRSS1 | NM_002769 | TRP1, | NP_002760 | 131, 132 | 1-15/16-23 | 24-246 |
| | trypsin | | | TRY1, | | | | (63, 107, 200) |
| | (Homo | | | TRY4, | | | | |
| | sapiens- | | | TRYP1 | | | | |
| | type 1) | | | | | | | |
| | (cationic) | | | | | | | |
| S01.131 | Neutrophils | ELA2 | NM_001972 | NE, HLE, | NP_001963 | 133, 134 | 1-27/28-29 | 30-249 |
| | elastase | | | HNE, | | | | (70, 117, 202) |
| | | | | PMN-E | | | | |
| S01.132 | mannan- | | AF284421 | | AAK84071 | 135, 136 | 1-19/ | 449-710 (497, |
| | binding | | | | | | | 553, 664) |
| | lectin- | | | | | | | |
| | associated | | | | | | | |
| | serine | | | | | | | |
| | protease-3 | | | | | | | |
| S01.133 | cathepsin G | CTSG | NM_001911 | CG, | NP_001902 | 137, 138 | 1-18/19-20 | 21-245 |
| | | | | MGC23078 | | | | (64, 108, 201) |
| S01.134 | myeloblastin | PRTN3 | NM_002777 | MBT, P29, | NP_002768 | 139, 140 | 1-25/26-27 | 28-250 |
| | (proteinase | | | ACPA, | | | | (71, 118, 203) |
| | 3) | | | AGP7, PR- | | | | |
| | | | | 3, C- | | | | |
| | | | | ANCA | | | | |
| S01.135 | granzyme A | GZMA | NM_006144 | HFSP, | NP_006135 | 141, 142 | 1-26/27-28 | 29-261 |
| | | | | CTLA3 | | | | (69, 114, 212) |
| S01.139 | granzyme M | GZMM | NM_005317 | MET1, | NP_005308 | 143, 144 | 1-23/24-25 | 26-256 |
| | | | | LMET1 | | | | (66, 111, 207) |
| S01.140 | chymase | CMA1 | NM_001836 | CYH, | NP_001827 | 145, 146 | 1-19/21-21 | 22-247 |
| | (human- | | | MCT1 | | | | (66, 110, 203) |
| | type) | | | | | | | |
| S01.143 | tryptase | TPS1 | NM_003294 | TPS1, | NP_003285 | 147, 148 | 1-18/19-30 | 31-274 |
| | alpha (1) | | | TPS2, | | | | (74, 121, 224) |
| | | | | TPSB1, | | | | |
| | | | | alpha II | | | | |
| S01.146 | granzyme K | GZMK | NM_002104 | TRYP2 | NP_002095 | 149, 150 | 1-24/26-26 | 27-261 |
| | | | | | | | | (67, 116, 214) |
| S01.147 | granzyme H | GZMH | NM_033423 | CCP-X, | NP_219491 | 151, 152 | 1-18/19-20 | 21-246 |
| | | | | CGL-2, | | | | (64, 108, 202) |
| | | | | CSP-C, | | | | |
| | | | | CTLA1, | | | | |
| | | | | CTSGL2 | | | | |
| S01.152 | chymotrypsin B | CTRB1 | M24400 | CTRB, | P17538 | 7, 8 | 1-18 | 34-263 |
| | | | | MGC88037 | | | | (75, 120, 213) |
| S01.153 | pancreatic | ELA1 | NM_001971 | | NP_001962 | 153, 154 | 1-8/9-18 | 19-256 |
| | elastase | | | | | | | (63, 111, 206) |
| S01.154 | pancreatic | | NM_005747 | ELA3 | NP_005738 | 155, 156 | 1-15/16-28 | 29-270 |
| | endopeptidase | | | | | | | (73, 123, 217) |
| | E (A) | | | | | | | |
| S01.155 | pancreatic | | M16652 | | AAA52380 | 157, 158 | 1-16/7-28 | 29-269 |
| | elastase II | | | | | | | (73, 121, 216) |
| | (IIA) | | | | | | | |
| S01.156 | Enteropeptidase | PRSS7 | NM_002772 | ENTK | NP_002763 | 159, 160 | | 785-1019 |
| | | | | | | | | (825, 876, 971) |
| S01.157 | chymotrypsin C | | NM_007272 | CLCR | NP_009203 | 161, 162 | 1-16/17-29 | 30-268 |
| | | | | | | | | (74, 121, 216) |
| S01.159 | Prostasin | PRSS8 | NM_002773 | | NP_002764 | 163, 164 | 1-29/30-32 | 45-288 |
| | | | | | | | | (85, 134, 238) |
| S01.160 | kallikrein 1 | KLK1 | NM_002257 | hK1, | NP_002248 | 165, 166 | 1-18/19-24 | 25-261 |
| | | | | KLKR, | | | | (65, 120, 214) |
| | | | | Klk6 | | | | |
| SO1.161 | kallikrein | KLK2 | NM_005551 | hK2, | NP_005542 | 167, 168 | 1-18/19-24 | 25-260 |
| | hK2 (Homo | | (v1) | KLK2A2, | NP_001002231 | (v1); 169, | | (65, 120, 213) |
| | sapiens) | | NM_001002231 | MGC12201 | NP_001002232 | 170 (v2); | | |
| | | | (v2) | | | 171, 172 | | |
| | | | NM_001002232 | | | (v3) | | |
| | | | (v3) | | | | | |
| S01.162 | kallikrein 3 | KLK3 | NM_001648 | APS, PSA, | NP_001639 | 173, 174 | 1-17/18-24 | 25-260 |
| | | | (v1) | hK3, | NP_001025218 | (v1); 175, | | (65, 120, 213) |
| | | | NM_001030047 | KLK2A1 | NP_001025219 | 176 (v3); | | |
| | | | (v3) | | NP_001025220 | 177, 178 | | |
| | | | NM_001030048 | | NP_001025221 | (v4); 179, | | |
| | | | (v4) | | | 180 (v5); | | |
| | | | NM_001030049 | | | 181, 182 | | |
| | | | (v5) | | | (v6) | | |
| | | | NM_001030050 | | | | | |
| | | | (v6) | | | | | |
| S01.174 | Mesotrypsin | PRSS3 | NM_002771 | MTG, | NP_002762 | 183, 184 | 1-24/ | 24-246 |
| | | | | TRY3, | | | | (63, 107, 200) |
| | | | | TRY4, | | | | |
| | | | | PRSS4 | | | | |
| S01.205 | pancreatic | ELA3B | NM_007352 | | NP_031378 | 185, 186 | 1-15/16-28 | 29-270 |
| | endopeptidase | | | | | | | (73, 123, 217) |
| | E form B | | | | | | | |
| | (B) | | | | | | | |
| S01.206 | pancreatic | | NM_015849 | MGC97052 | NP_056933 | 187, 188 | 1-16/17-28 | 29-269 |
| | elastase II | | | | | | | (73, 121, 216) |
| | form B | | | | | | | |
| | (Homos | | | | | | | |
| | sapiens) | | | | | | | |
| | (IIB) | | | | | | | |
| S01.211 | coagulation | F12 | NM_000505 | HAF | NP_000496 | 189, 190 | 1-19/ | 373-615 |
| | factor XIIa | | | | | | | (412, 461, 563) |
| S01.212 | plasma | KLKB1 | NM_000892 | KLK3 | NP_000883 | 191, 192 | 1-19/ | 391-628 |
| | kallikrein | | | | | | | (434, 483, 578) |
| S01.213 | coagulation | F11 | NM_000128 | FXI | NP_000119 | 193, 194 | 1-18/ | 388-625 |
| | factor XIa | | (v1) | | NP_062505 | (v1); 195, | | (431, 480, 575) |
| | | | NM_019559 | | | 196 (v2) | | |
| | | | (v2) | | | | | |
| S01.214 | coagulation | F9 | NM_000133 | FIX, PTC | NP_000124 | 197, 198 | 1-28/29-46 | 227-461 |
| | factor IXa | | | HEMB, | | | | (267, 315, 411) |
| | | | | GLA | | | | |
| | | | | domain | | | | |
| S01.215 | coagulation | F7 | NM_000131 | | NP_000122 | 199, 200 | 1-20/21-60 | 213-454 |
| | factor VIIa | | (v1) | | NP_062562 | (v1); 201, | | (253, 302, 404) |
| | | | NM_019616 | | | 202 (v2) | | |
| | | | (v2) | | | | | |
| S01.216 | coagulation | F10 | NM_000504 | FX, FXA | NP_000495 | 203, 204 | 1-31/32-40 | 235-469 |
| | factor Xa | | | | | | | (276, 322, 419) |
| S01.217 | Thrombin | F2 | NM_000506 | PT | NP_000497 | 205, 206 | 1-24/25-43 | 364-620 |
| | | | | | | | | (406, 462, 568) |
| S01.218 | protein C | PROC | NM_000312 | PROC1, | NP_000303 | 207, 208 | 1-32/33-42 | 212-452 |
| | (activated) | | | protein C | | | | (253, 299, 402) |
| S01.223 | Acrosin | ACR | NM_001097 | | NP_001088 | 209, 210 | 1-19 | 43-292 |
| | | | | | | | | (88, 142, 240) |
| S01.224 | Hepsin | HPN | NM_182983 | TMPRSS1 | NP_892028 | 211, 212 | | 163-407 |
| | | | (v1) | | NP_002142 | (v1); 213, | | (203, 257, 353) |
| | | | NM_002151 | | | 214 (v2) | | |
| | | | (v2) | | | | | |
| S01.228 | hepatocyte | HGFAC | NM_001528 | HGFA | NP_001519 | 215, 216 | 1-35/36-372 | 408-648 |
| | growth | | | | | | | (447, 497, 598) |
| | factor | | | | | | | |
| | activator | | | | | | | |
| S01.231 | u- | PLAU | NM_002658 | ATF, | NP_002649 | 217, 218 | 1-20/ | 179-426 |
| | plasminogen | | | UPA, | | | | (224, 275, 376) |
| | activator | | | URK, uPA | | | | |
| | (uPA) | | | | | | | |
| S01.232 | t- | PLAT | NM_000930 | TPA, TPA, | NP_000921 | 219, 220 | 1-23/24-32 | 311-562 |
| | plasminogen | | (v1) | | NP_000922 | (v1); 221, | and 33-35 | (357, 406, 513) |
| | activator | | NM_000931 | DKFZp686 | NP_127509 | 222 (V2), | | |
| | (tPA) | | (v2) | I03148 | | 223, 224 | | |
| | | | NM_033011 | | | (V3) | | |
| | | | (v3) | | | | | |
| S01.233 | Plasmin | PLG | NM_00301 | DKFZp779 | NP_000292 | 225, 226 | 1-19/20-97 | 581-810 |
| | | | | M0222 | | | | (622, 665, 760) |
| S01.236 | Neurosin | KLK6 | NM_002774 | hK6, Bssp, | NP_002765 | 227, 228 | 1-16/17-21 | 22-244 |
| | | | (vA) | Klk7, | NP_001012982 | (vA); 229, | | (62, 106, 197) |
| | | | NM_001012964 | SP59, | NP_001012983 | 230 (vB); | | |
| | | | (vB) | ZYME, | NP_001012984 | 231, 232 | | |
| | | | NM_001012965 | PRSS9, | | (vC); 233, | | |
| | | | (vC) | PRSS18, | | 234 (vD) | | |
| | | | NM_001012966 | MGC9355, | | | | |
| | | | (vD) | NEUROSIN | | | | |
| S01.237 | Neurotrypsin | PRSS12 | NM_003619 | BSSP3, | NP_003610 | 235, 236 | 1-20/ | 631-875 |
| | | | | BSSP-3, | | | | (676, 726, 825) |
| | | | | MGC12722, | | | | |
| | | | | MOTOPSIN | | | | |
| S01.242 | tryptase | TPSB1 | NM_024164 | TPS2, | NP_077078 | 237, 238 | 1-30/ | 31-268 |
| | beta 2 | | | TPSB1, | | | | |
| | (Homo | | | tryptaseC | | | | |
| | sapiens) (I) | | | | | | | |
| S01.244 | Neuropsin | KLK8 | NM_007196 | NP, HNP, | NP_009127 | 239, 240 | 1-28/29-32 | 33-258 |
| | | | (v1) | NRPN, | NP_653088 | (v1); 241, | | (73, 120, 212) |
| | | | NM_144505 | PRSS19, | NP_653089 | 242 (v2), | | |
| | | | (v2) | TADG14 | NP_653090 | 243, 244 | | |
| | | | NM_144506 | | | (v3); 245, | | |
| | | | (v3) | | | 246 (v4) | | |
| | | | NM_144507 | | | | | |
| | | | (v4) | | | | | |
| S01.246 | kallikrein | KLK10 | NM_002776 | NES1, | NP_002767 | 247, 248 | 1-30/ | 35-276 |
| | hK10 | | (v1) | PRSSL1 | NP_665895 | (v1); 249, | | (86, 137, 229) |
| | (Homo | | NM_145888 | | | 250 (v2) | | |
| | sapiens) | | (v2) | | | | | |
| S01.247 | Epitheliasin | TMPRSS2 | NM_005656 | PRSS10 | NP_005647 | 251, 252 | | 256-491 |
| | | | | | | | | (296, 345, 441) |
| S01.251 | Prostase | KLK4 | NM_004917 | ARM1, | NP_004908 | 253, 254 | 1-26/27-30 | 31-254 |
| | | | | EMSP, | | | | (71, 116, 207) |
| | | | | PSTS, | | | | |
| | | | | EMSP1, | | | | |
| | | | | KLK-L1, | | | | |
| | | | | PRSS17 | | | | |
| S01.252 | Brain serine | | NM_022119 | BSSP-4 | NP_071402 | 255, 256 | 1-32 | 50-292 |
| | proteinase 2 | | | MGC9599, | | | | (90, 141, 242) |
| | | | | SP001LA, | | | | |
| | | | | hBSSP-4 | | | | |
| S01.256 | Chymopasin | CTRL | NM_001907 | CTRL1, | NP_001898 | 257, 258 | 1-18/19-33 | 34-264 |
| | | | | MGC70821 | | | | (75, 121, 214) |
| S01.257 | kallikrein | KLK11 | NM_006853 | TLSP, | NP_006844 | 259, 260 | | 22-250 |
| | 1I | | 3 (v1) | PRSS20, | 4 | (v1); 261, | 1-50/51-53 | (62, 110, 203) |
| | | | NM_144947 | MGC33060 | NP_659196 | 262 (v2) | | |
| | | | (v2) | | | | | |
| S01.258 | anionic | PRSS2 | NM_002770 | TRY2, | NP_002761 | 263, 264 | 1-15/16-23 | 24-246 |
| | trypsin | | | TRY8, | | | | (63, 107, 200) |
| | (Homo | | | TRYP2 | | | | |
| | sapiens) (II) | | | | | | | |
| S01.291 | LOC144757 | | Putative | MGC57341 | AAH48112 | 265, 266 | | 78-319 |
| | peptidase | | BC048112 | | | | | (122, 171, 268) |
| | (Homo | | | | | | | |
| | sapiens) | | | | | | | |
| S01.292 | Mername- | | BN000133 | | CAD67985 | 267, 268 | 1-19 | 175-406 |
| | AA169 | | | | | | | (215, 260, 356) |
| | peptidase | | | | | | | |
| S01.294 | Mername- | | Putative | | | 269 | | |
| | AA171 | | No DNA | | | | | |
| | peptidase | | | | | | | |
| S01.298 | Mername- | | Putative | TRY6 | AAC80208 | 270 | | 24-246 |
| | AA174 | | no DNA | | | | | (63, 107, 200) |
| | peptidase | | seq | | | | | |
| S01.299 | Mername- | | NM_198464 | | NP_940866 | 271, 272 | | 68-302 |
| | AA175 | | | | | | | (108, 156, 250) |
| | peptidase | | | | | | | |
| S01.300 | stratum | KLK7 | NM_005046 | SCCE, | NP_005037 | 273, 274 | 1-22/23-29 | 30-250 |
| | corneum | | (v1) | PRSS6 | NP_644806 | (v1); 275, | | (70, 112, 205) |
| | chymotryptic | | NM_139277 | | | 276 (v2) | | |
| | enzyme | | (v2) | | | | | |
| S01.301 | trypsin-like | | NM_004262 | HAT | NP_004253 | 277, 278 | | 187-471 |
| | enzyme, | | | | | | | (227, 272, 368) |
| | respiratory | | | | | | | |
| | (Homo | | | | | | | |
| | sapiens) | | | | | | | |
| S01.302 | Matripase | ST14 | AF118224 | HAI, | AAD42765 | 1, 2 | | 615-855 |
| | | | | MTSP1, | | | | (656, 711, 805) |
| | | | | SNC19, | | | | |
| | | | | MT-SP1, | | | | |
| | | | | MTSP-1, | | | | |
| | | | | PRSS14, | | | | |
| | | | | TADG-15 | | | | |
| S01.306 | kallikrein | KLK13 | NM_015596 | KLKL4, | NP_056411 | 279, 280 | 1-16/ | 36-263 |
| | hK13 | | | KLK-L4, | | | | (76, 124, 218) |
| | | | | DKFZP58 | | | | |
| | | | | 6J1923 | | | | |
| S01.307 | kallikrein | KLK9 | NM_012315 | KLKL3, | NP_036447 | 281, 282 | 1-15/ | 23-250 |
| | hK9 | | | KLK-L3 | | | | (63, 111, 204) |
| | (human | | | | | | | |
| | numbering) | | | | | | | |
| S01.308 | Mername- | | NM_153609 | | NP_705837 | 283, 284 | | 49-283 |
| | AA035 | | | | | | | (89, 140, 234) |
| | peptidase | | | | | | | |
| S01.309 | umbilical | | NM_007173 | SIG13, | NP_009104 | 285, 286 | 1-23/ | 95-383 |
| | vein | | | SPUVE, | | | | (175, 246, 316) |
| | proteinase | | | ZSIG13, | | | | |
| | | | | MGC5107 | | | | |
| S01.311 | LCLP | | Peptide | | P34168 | 287 | | 1-26 |
| | proteinase | | fragment | | | | | (0) |
| | (LCLP (N- | | No DNA | | | | | |
| | terminus)) | | | | | | | |
| S01.313 | Spinesin | TMPRSS5 | NM_030770 | | NP_110397 | 288, 289 | | 218-455 |
| | | | | | | | | (258, 308, 405) |
| S01.318 | Mername- | MPN2 | NM_183062 | | NP_898885 | 290, 291 | 1-33/ | 53-288 |
| | AA178 | | | | | | | (93, 143, 238) |
| | peptidase | | | | | | | |
| S01.320 | Mername- | OVTN | BN000120 | | CAD66452 | 292, 293 | 1-23/ | 52-301 |
| | AA180 | | | | | | | (92, 142, 240) |
| | peptidase | | | | | | | |
| S01.322 | Mername- | OVCH1 | BN000128 | | CAD67579 | 294, 295 | 1-17/ | 8-298 |
| | AA182 | | | | | | | (87, 139, 237) |
| | peptidase | | | | | | | |
| S01.414 | Mername- | | Putative | | BAC11431 | 296, 297 | | 1-177 |
| | AA122 | | AK075142 | | | | | (12, 64, 168) |
| | peptidase | | | | | | | |
| | (deduced | | | | | | | |
| | from ESTs | | | | | | | |
| | by | | | | | | | |
| | MEROPS) | | | | | | | |
| C01.032 | Cathepsin L | CTSL | Y14734 | | P07711 | 372, 373 | 1-17/18-113 | 113-333 |
| | | | | | | | | (132, 138, 276, |
| | | | | | | | | 300) |
| C01.009 | Cathepsin V | CTSL2 | U13665 | | O60911 | 374, 375 | 1-17/18-113 | 114-334 |
| | | | | | | | | (132, 138, 277, |
| | | | | | | | | 301) |
| C01.036 | Cathepsin K | CTSK | S93414 | | P43235 | 376, 377 | 1-15/16-114 | 115-329 |
| | | | | | | | | (133, 139, 276, |
| | | | | | | | | 296) |
| C01.034 | Cathepsin S | CTSS | AJ007331 | | P25774 | 378, 379 | 1-16/17-114 | 115-331 |
| | | | | | | | | (133, 139, 278, |
| | | | | | | | | 298) |
| C01.018 | Cathepsin F | CTSF | M14221 | | Q9UBX1 | 380, 381 | 1-19/20-270 | 271-484 |
| | | | | | | | | (289, 295, 431, |
| | | | | | | | | 451) |
| C01.060 | Cathepsin B | CTSB | M15203 | | P07858 | 382, 383 | 1-17/18-79 | 80-331 |
| | | | | | | | | (102, 108, 278, |
| | | | | | | | | 298) |
| C01.001 | Papain | | M84342 | | P00784 | 384, 385 | 1-18/19-133 | 135-342 |
| | | | | | | | | (158, 292, 308) |
| C01.075 | Cruzain | | Y14734 | | P25779 | 386, 387 | 123-467/ | 124-334 |
| | (Cruzapain) | | | | | | | (147, 284, 304, |
| A02.001 | HIV-1 | | | HIV-1 | P03366 | 544 | | |
| | protease | | | retropepsin; | (aa 500-598) | | | |
| | | | | HIV-1 PR | | | | |
| A02.015 | RSV | | | avian | P03322 | 545 | | |
| | protease | | | myeloblastosis | (aa 578-701) | | | |
| | | | | virus | | | | |
| | | | | retropepsin; | | | | |
| | | | | avian | | | | |
| | | | | sarcoma | | | | |
| | | | | virus | | | | |
| | | | | endopeptidase; | | | | |
| | | | | retropepsin | | | | |
| M10.005 | Matrix | MMP3 | X05232 | collagenase | CAA28859.1 | 546, 547 | | |
| | metalloprotease-3 | | | activating | | | | |
| | | | | protein; | | | | |
| | | | | MMP-3; | | | | |
| | | | | stromelysin | | | | |
| | | | | 1; transin | | | | |
| M12.209 | ADAM9 | ADAM9 | NM_003816 | MDC9 | NP_003807 | 548, 549 | | |
| | endopeptidase | | | | | | | |
| M12.210 | ADAM10 | ADAM10 | NM_003816 | MADM | NP_001101 | 550, 551 | | |
| | endopeptidase | | | | | | | |

[0376] In some embodiments, the protease scaffold is a granzyme B, granzyme A, granzyme M, cathepsin G, MT-SP1, neutrophil elastase, chymase, alpha-tryptase, beta-trypsase I or II, chymotrypsin, collagenase, factor XII, factor XI, factor CII, factor X, thrombin, protein C, u-plasminogen activator (u-PA), t-plasminogen activator (t-PA), plasmin, plasma kallikrein, chymotrypsin, trypsin, a cathepsin, papain, cruzain, a metalloprotease and allelic variations, isoforms and catalytically active portions thereof. Such proteases can be used in the methods provided herein to target one or more target substrates of a complement pathway. Such proteases also can be modified to have altered specificity or selectivity for any one or more protein components of the complement pathway and/or to modulate an activity of a complement protein or pathway. The proteases or modified proteases can be used in the methods provided herein to modulate complement activation, and hence can be used as therapeutic to treat any complement-mediated disease or disorder. In some embodiments, the protease scaffold is MT-SP1. Modifications of amino acids in MT-SP1 can be made to alter the specificity and/or selectivity for a complement protein target substrate.

[0377] 1. Modified Scaffold Proteases

[0378] Virtually every aspect of a protease can be re-engineered, including the enzyme substrate sequence specificity, thermostability, pH profile, catalytic efficiency, oxidative stability, and catalytic function. Provided herein are modified proteases that exhibit increased specificity and/or selectivity to any one or more complement proteins compared to a scaffold protease. Proteases can be modified using any method known in the art for modification of proteins. Such methods include site-directed and random mutagenesis. Assays such as the assays for biological function of complement activation provided herein and known in the art can be used to assess the biological function of a modified protease to determine if the modified protease targets a substrate for cleavage and inactivation. Exemplary methods to identify a protease and the modified proteases are provided herein.

[0379] For example, any of a variety of general approaches for protein-directed evolution based on mutagenesis can be employed. Any of these, alone or in combination can be used to modify a polypeptide such as a protease to achieve altered specificity and/or selectivity to a target substrate. Such methods include random mutagenesis, where the amino acids in the starting protein sequence are replaced by all (or a group) of the 20 amino acids either in single or multiple replacements at different amino acid positions on the same molecule, at the same time. Another method, restricted random mutagenesis, introduces either all or some of the 20 amino acids or DNA-biased residues. The bias is based on the sequence of the DNA and not on that of the protein in a stochastic or semi-stochastic manner, respectively, within restricted or predefined regions of the protein known in advance to be involved in the biological activity being “evolved.” Exemplary methods for generating modified proteases are described in related U.S. application Ser. No. 10/677,977, herein incorporated by reference in its entirety. Additionally, any method known in the art can be used to modify or alter a protease polypeptide sequence.

[0380] Among the modified polypeptides provided herein are proteases with one or more modifications compared to a scaffold protease. Modified protease polypeptides include those with 1, 2, 3, 4, 5, 6, 7, 8, 9, 10, 11, 12, 13, 14, 15, 16, 17, 18, 19, 20 or more modified positions. Modified proteases provided herein retain their protease ability but display altered (i.e. enhanced) specificity towards any one or more complement protein target substrates compared to a natural substrate of the protease and/or display an altered selectivity for any one or more proteins of the complement system. A modified protease specific for any one or more of the complement proteins can be generated rationally or empirically by: (a) rationally targeting sites that complement a cleavage sequence of a target complement substrate recognized by a known protease, such as for example, complement Factor I or, (b) empirically testing a library of modified proteases in functional assays for inactivation of the complement cascade.

[0381] a. Rational Modification

[0382] Methods are provided to rationally modify a protease to increase the specificity and/or selectivity to a target substrate, such as to any one or more complement proteins. In such a method, a cleavage sequence of the target substrate is known. Cleavage sites within target proteins are identified by the following criteria: 1) they are located on the exposed surface of the protein; 2) they are located in regions that are devoid of secondary structure (i.e. not in P sheets or helices), as determined by atomic structure or structure prediction algorithms (these regions tend to be loops on the surface of proteins or stalk on cell surface receptors); 3) they are located at sites that are likely to inactivate the protein, based on its known function. Cleavage sequences are e.g., four residues in length to match the extended substrate specificity of many proteases, but can be longer or shorter.

[0383] Factor I is a serine protease that functions as a natural regulator of complement activation by cleaving C3b and C4b. Factor I cleaves and inactivates C3b and C4b after activation by the convertase on C3 and C4, respectively, and release of C3a and C4a. The peptide cleavage sequences recognized by Factor I include LPSR (SEQ ID NO: 388) and SLLR (SEQ ID NO: 389) in C3 and HRGR (SEQ ID NO: 390) in C4 (see e.g., Davis et al., (1982) Biochemistry 21:5745); Harrison et al., (1980) Mol. Immunology 17:9; Kai et al., (1980) J Immunol. 125:2409). Provided herein are methods to rationally design the specificity binding pocket of a protease to recognize and specifically cleave Factor I substrates, including C3 and C4 as well as iC3, C3b, iC4, and C4b, thereby inhibiting complement activation. Products that cleave the Factor I substrates are provided.

[0384] As an example, modified proteases with altered specificity for a Factor I target sequence are generated by a structure-based design approach. Each protease has a series of amino acids that line the active site pocket and make direct contact with a substrate. The amino acids that line the active site pocket of a protease are designated S1-S4 and the respective substrate contact sites are designated P1-P4. The identity of the amino acids that contain the S1-S4 pocket of the active site determines the substrate specificity of that particular pocket. Amino acids that form the substrate binding pocket of exemplary proteases are described herein. Generally, the substrate specificity of a protease is known or can be determined, such as, for example by molecular modeling based on three-dimensional structures of the complex of a protease and substrate (see for example, Wang et al., (2001) Biochemistry 40(34):10038; Hopfner et al., Structure Fold Des. 1999 7(8):989; Friedrich et al., (2002) J Biol Chem 277(3):2160; Waugh et al., (2000) Nat Struct Biol. 7(9):762). In one example, the amino acids that participate in the S1-S4 substrate binding pocket of MT-SP1 are as follows (based on chymotrypsin numbering): 189, 190, 191, 192, 216 and 226 (S1); 57, 58, 59, 60, 61, 62, 63, 64, 99 (S2); 146, 192, 217, 218 (S3); 96, 97, 98, 99, 100, 168, 169, 170, 170A, 171, 172, 173, 174, 175, 176, 178,179, 180, 215, 217, 224 (S4). In another example, the amino acids in a papain family protease that contribute to P2 specificity (standard papain numbering) include amino acids 66-68, 133, 157, 160, and/or 215. Modifying any one or more of the amino acids that make up the S1-S4 active site of a protease would alter the substrate specificity of that protease. For example, a mutation at position 99 in the S2 pocket of a serine protease, such as for example an MT-SP1 protease, to a smaller amino acid confers a preference for larger hydrophobic residues in the P2 substrate position. Using this process of selective mutagenesis, proteases with substrate specificities to a Factor I cleavage sequence can be generated.

[0385] In one embodiment, point mutations can be made in the amino acids that contribute to the specificity binding pocket of a protease, particularly in any one or more S1-S4 amino acid residues that contribute to P1-P4 substrate specificity. Generally, the amino acid residues that contribute to the P1-P4 specificity of a protease can be rationally replaced so that the target substrate cleavage site recognized by Factor I is produced. In one example, a protease can be modified to recognize the target cleavage sequence LPSR/KI where any one or more amino acids in the S4 position can be modified to recognize a leucine at the P4 position, any one or more amino acids in the S3 position can be modified to recognize a proline at the P3 position, any one or more amino acids in the S2 position can be modified to recognize a serine at the P2 position, and any one or more amino acids in the S1 position can be modified to recognize an arginine at the P1 position. In another example, a protease can be modified to recognize the target cleavage sequence SLLR/SE where any one or more amino acids in the S4 position can be modified to recognize a serine at the P4 position, any one or more amino acids in the S3 position can be modified to recognize a leucine at the P3 position, any one or more amino acids in the S2 position can be modified to recognize a leucine at the P2 position, and any one or more amino acids in the S1 position can be modified to recognize an arginine at the P1 position. In an additional example, a protease can be modified to recognize the target cleavage sequence HRGR/TL where any one or more amino acids in the S4 position can be modified to recognize a histidine at the P4 position, any one or more amino acids in the S3 position can be modified to recognize an arginine at the P3 position, any one or more amino acids in the S2 position can be modified to recognize a glycine at the P2 position, and any one or more amino acids in the S1 position can be modified to recognize an arginine at the P1 position. In some cases, mutations in serine proteases have shown that each of the sub-sites that form the active site (S1-S4) function independently of one another, such that modification of specificity at one sub-site has little influence on specificity at adjacent sub-sites. Thus, engineering substrate specificity and/or selectivity throughout the extended binding site can be accomplished in a step-wise manner.

[0386] For example, a protease with low specificity for a residue at a particular binding site or for a particular sequence is altered in its specificity by making point mutations in the substrate sequence binding pocket. In some cases, the resulting mutant has a greater than 1.5, 2, 5, 8, 10-fold or greater increase in specificity at a site for a particular sequence than does wildtype. In another embodiment, the resulting mutant has a greater than 100-fold increase in specificity at a site for a particular sequence than does wildtype. In another embodiment, the resulting mutant has an over 1000-fold increase in specificity at a site or for a particular sequence than does a wildtype.

[0387] In one exemplary embodiment, wildtype MT-SP1 protease having a P1-P4 preference for a target cleavage sequence of Arg/Lys at P4, basic residues or Gin at P3, small residues at P2, and Arg or Lys at P1 can be modified so that the Factor I cleavage sequence of LPSR, SLLR, or HRGR is recognized by an MT-SP1 protease (see Table 15). In such an example, the S1 position of the modified MT-SP1 is unchanged since the arginine residue at the P1 site is conserved between the target substrate cleavage site of MT-SP1 and the Factor I cleavage sites. Amino acid residues in any one of more of the S2-S4 sub-sites of MT-SP1 can be modified alone or in combination to increase the specificity and/or selectivity for a Factor I cleavage sequence. For example, to modify an MT-SP1 set forth in SEQ ID NO:2 or 10 to have increased specificity and/or selectivity for a SLLR Factor I cleavage sequence in C3b, modifications in the S4 position of MT-SP1 to recognize a serine in the P4 position of the substrate can include amino acid modifications Q174H, D217Q, D217N, D217H, D96A, D96V, D96F, D96S, and/or D96T, based on chymotrypsin numbering; modification in the S3 position of MT-SP1 to recognize a leucine in the P3 position of the substrate can include amino acid modifications Q192L, Q192I, Q192F, and/or Y146F, based on chymotrypsin numbering; and/or modifications in the S2 position of MT-SP1 to recognize a leucine in the P2 position of the substrate can include amino acid modifications F99A, F99V, F99S, and/or F99G, based on chymotrypsin numbering. In another example, to modify an MT-SP1 set forth in SEQ ID NO: 2 or 10 to have increased specificity and/or selectivity for a LPSR Factor I cleavage sequence in C3b, modifications in the S4 position of MT-SP1 to recognize a leucine in the P4 position of the substrate can include amino acid modifications W215F, W215Y, Q174F, Q174V, Q174L, Q174Y, and/or M180E, based on chymotrypsin numbering; modifications in the S3 position of MT-SP1 to recognize a proline in the P3 position of the substrate can include amino acid modifications Q192K, Q192R, Q192R, based on chymotrypsin numbering; and/or modifications in the S2 position of MT-SP1 to recognize a serine in the P2 position of the substrate can include amino acid modifications F99Y, based on chymotrypsin numbering. In an additional example, to modify an MT-SP1 set forth in SEQ ID NO: 2 or 10 to have increased specificity and/or selectivity for a HRGR Factor I cleavage sequence in C4b, modifications in the S4 position of MT-SP1 to recognize a histidine in the P4 position of the substrate can include amino acid modifications W215F, W215Y, Q174A, Q174V, Q174F, Q174R, and/or Q174K, based on chymotrypsin numbering; modifications in the S3 position of MT-SP1 to recognize an arginine in the P3 position of the substrate can include amino acid modifications D217A, D217V, and/or Q192E, based on chymotrypsin numbering; and/or modification is the S2 position of MT-SP1 to recognize a glycine in the P2 position of the substrate can include amino acid modifications F99W, F99Y, and/or F99D, based on chymotrypsin numbering. Exemplary modifications of an MT-SP1 protease scaffold are summarized in Table 15. Combinations of modifications of the noted positions also are contemplated. Any method known in the art to effect mutation of any one or more amino acids in a target protein can be employed. Methods include standard site-directed mutagenesis (using e.g., a kit, such as kit such as QuikChange available from Stratagene) of encoding nucleic acid molecules, or by solid phase polypeptide synthesis methods.

TABLE 15
Exemplary modifications in MT-SP1 to alter target specificity to
Factor I cleavage sequence

| | S4 | | | | S3 | | | S2 |
|---|---|---|---|---|---|---|---|---|
| | D96 | Q174 | M180 | W215 | D217 | Y146 | Q192 | F99 |
| SLLR | A, V, F, S, T | H | | | Q, N, H | F | L, I, F | A, V, S, G |
| LPSR | | F, V, L, Y | E | F, Y | | | K, R, Y | Y |
| HRGR | | A, V, F, R, K | | F, Y | A, V | | E | W, Y |

[0388] i. Synthesis of Positional Scanning Libraries and Screening using Fluorescence

[0389] A protease, modified at any one or more of the S1-S4 subsites can be verified for P1-P4 substrate specificity at any given sub-site using a positional scanning synthetic combinatorial library (PS-SCL) containing a combinatorial fluorogenic substrate library (Harris et al., (2000) PNAS 97:7754; US 2004/0175777; US 2004/0146938). A PS-SCL strategy allows for the rapid and facile determination of proteolytic substrate specificity at any one or more S1-S4 active site sub-sites. A PS-SCL strategy involves the use of libraries of peptides whereby one position in the library is held constant, while the remaining positions are composed of all combinations of amino acids used to prepare the library. The use of a combinatorial fluorogenic peptide substrate library, such as for example a 7-amino-4-methylcoumarin (AMC) fluorogenic peptide substrate or a 7-amino-4-carbamoylmethylcoumarin (ACC) fluorogenic peptide substrate, can be used to assay for the activity of a modified protease whereby a fluorogenic moiety is released from a peptide substrate upon action of the protease. Those of skill in the art will appreciate that these methods provide a wide variety of alternative library formats. In one example, a protease can be profiled with a P1-diverse library. A P1-diverse tetrapeptide library contains ACC- or AMC-fluorogenic tetrapeptides whereby the P1 position is systematically held constant while the P2, P3, and P4 positions contain an equimolar mixture of any one or more of the 20 amino acids. An ACC P1-fixed library allows for the verification of the P4, P3, and P2 specificities of any one of the modified proteases. In another example, fixing the P2-position as a large hydrophobic amino acid can circumvent preferential internal cleavage by papain-fold proteases and lead to proper register of the substrate sequence. Determination and consideration of particular limitations relevant to any particular enzyme or method of substrate sequence specificity determination are within the ability of those of skill in the art.

[0390] Those of skill in the art will recognize that many methods exist to prepare the peptides. In an exemplary embodiment, the substrate library is screened by attaching a fluorogenically tagged substrate to a solid support. In one example, the fluorogenic leaving group from the substrate peptide is synthesized by condensing an N-Fmoc coumarin derivative, to acid-labile Rink linker to provide ACC resin (Backes et al., (2000) Nat Biotechnol. 18:187). Fmoc-removal produces a free amine. Natural, unnatural and modified amino acids can be coupled to the amine, which can be elaborated by the coupling of additional amino acids. In an alternative embodiment, the fluorogenic leaving group can be 7-amino-4-methylcoumarin (AMC) (Harris et al., (2000) PNAS 97:7754). After the synthesis of the peptide is complete, the peptide-fluorogenic moiety conjugate can be cleaved from the solid support, or alternatively, the conjugate can remain tethered to the solid support.

[0391] Typically, a method of preparing a fluorogenic peptide or a material including a fluorogenic peptide includes: (a) providing a first conjugate containing a fluorogenic moiety covalently bonded to a solid support; (b) contacting the first conjugate with a first protected amino acid moiety and an activating agent, thereby forming a peptide bond between a carboxyl group and the amine nitrogen of the first conjugate; (c) deprotecting, thereby forming a second conjugate having a reactive amine moiety; (d) contacting the second conjugate with a second protected amino acid and an activating agent, thereby forming a peptide bond between a carboxyl group and the reactive amine moiety; and (e) deprotecting, thereby forming a third conjugate having a reactive amine moiety. In an exemplary embodiment, the method further includes: (f) contacting the third conjugate with a third protected amino acid and an activating agent, thereby forming a peptide bond between a carboxyl group and the reactive amine moiety; and (e) deprotecting, thereby forming a fourth conjugate having a reactive amine moiety.

[0392] For amino acids that are difficult to couple (e.g., Ile, Val, etc.), free, unreacted amine can remain on the support and complicate subsequent synthesis and assay operations. A specialized capping step employing the 3-nitrotriazole active ester of acetic acid in DMF efficiently acylates the remaining aniline. The resulting acetic-acid capped coumarin that can be present in unpurified substrate sequence solution is generally not a protease substrate sequence.

[0393] Solid phase peptide synthesis in which the C-terminal amino acid of the sequence is attached to an insoluble support followed by sequential addition of the remaining amino acids in the sequence is an exemplary method for preparing the peptide backbone of the polypeptides provided herein. Techniques for solid phase synthesis are described by Narany and Merrifield, Solid-Phase Peptide Synthesis; pp. 3-284 in The Peptides: Analysis, Synthesis, Biology. Vol. 2; Special Methods in Peptide Synthesis, Part A., Gross and Meienhofer, eds. Academic press, N.Y., (1980); and Stewart et al., (1984) Solid Phase Peptide Synthesis, 2^{nd} etd. Pierce Chem. Co., Rockford, Ill. Solid phase synthesis is most easily accomplished with commercially available peptide synthesizers utilizing Fmoc or t-BOC chemistry.

[0394] For example, peptide synthesis can be performed using well known Fmoc synthesis chemistry. For example, the side chains of Asp, Ser, Thr, and Tyr are protected using t-butyl and the side chain of Cys residue using S-trityl and S-t-butylthio, and Lys residues are protected using t-Boc, Fmoc and 4-methyltrityl. Appropriately protected amino acid reagents are commercially available or can be prepared using art-recognized methods. The use of multiple protecting groups allows selective deblocking and coupling of a fluorophore to any particular desired side chain. Thus, for example, t-Boc deprotection is accomplished using TFA in dichloromethane. Fmoc deprotection is accomplished using, for example, 20% (v/v) piperidine in DMF or N-methylpyrolidone, and 4-methyltrityl deprotection is accomplished using, for example, 1 to 5% (v/v) TFA in water or 1% TFA and 5% triisopropylsilane in DCM. A-t-butylthio deprotection is accomplished using, for example, aqueous mercaptoethanol (10%). Removal of t-buyl, t-boc, and S-trityl groups is accomplished using, for example TFA:phenol:water:thioaniso:ethanedithio (85:5:5:2.5:2.5), or TFA:phenol:water (95:5:5).

[0395] Diversity at any particular position or combination of positions can be introduced using a mixture of at least two, six, 12, 20 or more amino acids to grow the peptide chain. The mixtures of amino acids can include any useful amount of a particular amino acid in combination with any useful amount of one or more different amino acids. In one embodiment, the mixture is an isokinetic mixture of amino acids (a mixture in appropriate ratios to allow for equal molar reactivity of all components).

[0396] Modified proteases can be combined to acquire the specificity of multiple modified proteases. A mutation at one residue of a scaffold, which produces specificity at one site, is combined in the same protease with another mutation at another site on the scaffold to make a combined specificity protease. Any number of mutations at discrete sites on the same scaffold can be used to create a combined specificity protease.

[0397] Modified proteases, such as for example a modified MT-SP1 protease, that match the desired specificity profile, can then be assayed using individual fluorogenic peptide substrates corresponding to the desired cleavage sequence. A method of assaying for a modified protease that can cleave any one or more of the Factor I cleavage sequences includes: (a) contacting a peptide fluorogenic sample (containing a Factor I cleavage sequence) with a protease, in such a manner whereby a fluorogenic moiety is released from a peptide substrate sequence upon action of the protease, thereby producing a fluorescent moiety; and (b) observing whether the sample undergoes a detectable change in fluorescence, the detectable change being an indication of the presence of the enzymatically active protease in the sample. In such an example an ACC- or AMC-tetrapeptide such as Ac-SLLR-AMC or Ac-HRGR-AMC can be made and incubated with a modified protease and activity of the protease can be assessed by assaying for release of the fluorogenic moiety.

[0398] Assaying for a protease in a solution simply requires adding a quantity of the stock solution of a protease to a fluorogenic protease indicator peptide and measuring the subsequent increase in fluorescence or decrease in excitation band in the absorption spectrum. The solution and the fluorogenic indicator also can be combined and assayed in a “digestion buffer” that optimizes activity of the protease. Buffers suitable for assaying protease activity are well known to those of skill in the art. In general, a buffer is selected with a Ph which corresponds to the Ph optimum of the particular protease. For example, a buffer particularly suitable for assaying elastase activity contains 50 mM sodium phosphate, 1 mM EDTA at pH 8.9. The measurement is most easily made in a fluorometer, an instrument that provides an “excitation” light source for the fluorophore and then measures the light subsequently emitted at a particular wavelength. Comparison with a control indicator solution lacking the protease provides a measure of the protease activity. The activity level can be precisely quantified by generating a standard curve for the protease/indicator combination in which the rate of change in fluorescence produced by protease solutions of known activity is determined.

[0399] While detection of fluorogenic compounds can be accomplished using a fluorometer, detection also can be accomplished by a variety of other methods well known to those of skill in the art. Thus, for example, when the fluorophores emit in the visible wavelengths, detection can be simply by visual inspection of fluorescence in response to excitation by a light source. Detection also can be by means of an image analysis system utilizing a video camera interfaced to a digitizer or other image acquisition system. Detection also can be by visualization through a filter, as under a fluorescence microscope. The microscope can provide a signal that is simply visualized by the operator. Alternatively, the signal can be recorded on photographic film or using a video analysis system. The signal also can simply be quantified in real time using either an image analysis system or a photometer.

[0400] Thus, for example, a basic assay for protease activity of a sample involves suspending or dissolving the sample in a buffer (at the pH optima of the particular protease being assayed), adding to the buffer a fluorogenic protease peptide indicator, and monitoring the resulting change in fluorescence using a spectrofluorometer as shown in e.g., Harris et al., (1998) J Biol Chem 273:27364. The spectrofluorometer is set to excite the fluorophore at the excitation wavelength of the fluorophore. The fluorogenic protease indicator is a substrate sequence of a protease that changes in fluorescence due to a protease cleaving the indicator.

[0401] Modified proteases also are assayed to ascertain that they will cleave the desired sequence when presented in the context of the full-length protein. The target substrate proteins containing Factor I cleavage sites are in the C3 and C4 sequences, specifically in C3b and C4b which are generated from C3 and C4, respectively, following convertase activation. Factor I also cleaves iC3 and iC4 which are altered species forms of C3 and C4. Methods to assess cleavage of a target protein are described herein and/or are well known in the art. In one example, a purified complement protein, C3b, C4b, iC3, or iC4, can be incubated in the presence or absence of a modified protease and the cleavage event can be monitored by SDS-PAGE followed by Coomassie Brilliant Blue staining for protein and analysis of cleavage products using densitometry. The activity of the target protein also is assayed, such as, for example in a hemolysis assay, using methods described herein or that are well known in the art, to verify that its function has been destroyed by the cleavage event.

[0402] b. Empirical Modification

[0403] A library of modified proteases can be generated by mutating any one or more amino acid residues of a protease using any method commonly known in the art (see also published U.S. Appln. No. 2004/0146938). The library of modified proteases can be tested in functional assays of complement activation to determine if they are “Hits” for inhibiting complement activation. The target complement substrate of the modified protease can be identified, and the peptide cleavage sequence can be determined.

[0404] In one example, any one or more amino acids of a protease are mutated using any standard site-directed mutagenesis kit such as for example QuikChange (Stratagene). In another example, any one or more amino acids of a protease are mutated by saturation mutagenesis of active site residues. In this example, residues that form the S1-S4 pocket of a protease (where the protease is in contact with the P1-P4 residues of the peptide substrate) and/or that have been shown to be important determinants of specificity are mutated to every possible amino acid, either alone or in combination. In some cases, there is little (if any) interaction between the S1-S4 pockets of the active site, such that each pocket appears to recognize and bind the corresponding residue on the peptide substrate sequence independent of the other pockets. Thus, the specificity determinants generally can be changed in one pocket without affecting the specificity of the other pockets. In one exemplary embodiment, a saturation mutagenesis technique is used in which the residue(s) lining the pocket are mutated to each of the 20 possible amino acids (see for example the Kunkle method, Current Protocols in Molecular Biology, John Wiley and Sons, Inc., Media Pa.). In such a technique, a mutagenic oligonucleotide primer is synthesized which contains either NNS or NNK-randomization at the desired codon. The primer is annealed to the single stranded DNA template and DNA polymerase is added to synthesize the complementary strand of the template. After ligation, the double stranded DNA template is transformed into E. coli for amplification.

[0405] Amino acids that form the extended substrate binding pocket of exemplary proteases are described herein. Generally, the substrate specificity of a protease is known such as for example by molecular modeling based on three-dimensional structures of the complex of a protease and substrate (see for example, Wang et al., (2001) Biochemistry 40(34):10038; Hopfner et al., Structure Fold Des. 1999 7(8):989; Friedrich et al., (2002) J Biol Chem 277(3):2160; Waugh et al., (2000) Nat Struct Biol. 7(9):762). In one example, mutations of MT-SP1 can be in any one or more residues (based on chymotrypsin numbering) that contribute to substrate specificity including 195, 102, 57 (the catalytic triad); 189, 190, 191, 192, 216 and 226 (S1); 57, 58, 59, 60, 61, 62, 63, 64, 99 (S2); 146, 192, 217, 218 (S3); 96, 97, 98, 99, 100, 168, 169, 170, 170A, 171, 172, 173, 174, 175, 176, 178, 179, 180, 215, 217, 224 (S4). In another example, mutation of amino acid residues in a papain family protease can be in any one or more residues that affect P2 specificity (standard papain numbering) including 66-68, 133, 157, 160, and/or 215. In addition, residues that do not directly contact the protease substrate, but do affect the position and/or conformation of contact residues (such as for example those listed above) also can be mutated to alter the specificity of a protease scaffold.

[0406] To identify those modified proteases that target any one or more of the complement proteins, a library of modified proteases generated from a protease scaffold, such as for example an MT-SP1 scaffold, are tested in functional assays of complement activation. Assays for complement activation are described herein and can include any one or more of hemolytic assays and/or assays to detect activation products of one or more of the complement cascades. For example, enzyme immunoassays or ELISAs can be used to detect the presence of cleavage products of complement activation such as for example C4a, C5a, C3b, C3d, and C5-b9. Modified proteases that inhibit the activation of complement (such as by increasing CH50 levels as determined by a hemolytic assay or decreasing the detection of a complement cleavage product) can be identified as a “Hit”. In one embodiment, combinations of “Hits” can be made to further increase the specificity and/or selectivity of a protease for inhibiting complement activation.

[0407] Modified proteases, such as for example a modified MT-SP1, that are identified as “Hits” for inhibiting complement activation in functional assays can be screened to determine the complement protein target substrate. Assays to detect for cleavage of a complement protein are described herein. In one example, a purified complement protein can be incubated in the presence or absence of a modified protease and analyzed and resolved on an SDS-PAGE gel and the protein cleavage products can be detected following staining with a protein stain such as Coomassie Brilliant Blue. Cleavage products can be excised and the peptide cleavage sequence can be determined by N-terminal sequencing. Using the identified peptide cleavage sequence as determined by empirically testing a library of modified proteases, further modified proteases can be identified and generated using the rational approach described above for Factor I cleavage sequences.

[0408] 2. Methods of Assessing Specificity

[0409] Provided herein are methods of assessing substrate specificity of the resulting scaffold or modified proteases. In one embodiment, the specificity of any one or more of the S1-S4 sub-sites can be determined using ACC or AMC positional scanning libraries as discussed above. In another embodiment the specificity of a scaffold or modified protease for a target substrate compared to a non-target substrate can be determined using single substrate kinetic assays, see e.g., Harris, et al. (2000) PNAS, 97:7754. In specific embodiments, comparison of the specificities of a target protease and a scaffold protease can be used to determine if the modified protease exhibits altered, for example, increased, specificity compared to a scaffold protease.

[0410] The specificity of a protease for a target substrate can be measured by observing how many disparate sequences a modified protease cleaves at a given activity compared to a scaffold protease. If the modified protease cleaves fewer target substrates than the wildtype protease, the modified protease has greater specificity than the scaffold protease for those target substrates. The specificity of a protease for a target substrate can be determined from the specificity constant of cleavage of a target substrate compared to a non-target substrate (i.e. a native wildtype substrate sequence of a protease). A ratio of the specificity constants of a modified protease for a target substrate versus a non-target substrate can be made to determine a ratio of the efficiency of cleavage of the protease. Comparison of the ratio of the efficiency of cleavage between a modified protease and a scaffold protease can be used to assess the fold change in specificity for a target substrate. The fold change is an increase in specificity of a modified protease for a target substrate compared to a scaffold protease that is sufficient to achieve a predetermined alteration in complement activation or in a complement-mediated activity. Specificity can be at least 2-fold, at least 4-fold, at least 5-fold, at least 6-fold, at least 7-fold, 8, 9, 10, 20, 30, 40, 50, 60, 70, 80, 90, 100, 200, 300, 400, 500, 600, 700, 800, 900, 1000-fold or more when compared to the specificity of a scaffold protein for a target substrate versus a non-target substrate.

[0411] In one example, a modified protease that matches the desired specificity profiles, as determined by using positional scanning substrate libraries, can be assayed using individual peptide substrates corresponding to the desired target cleavage sequence compared to a non-target substrate cleavage sequence to determine the magnitude and change in specificity. In one embodiment, the individual peptide cleavage sequences can be attached to a fluorogenically tagged substrate, such as for example an ACC or AMC fluorogenic leaving group such as is described herein, and the release of the fluorogenic moiety can be determined as a measure of specificity of a protease for a peptide cleavage sequence. The rate of increase in fluorescence of a non-target substrate cleavage sequence or target cleavage sequence can be measured such as by using a fluorescence spectrophotometer. The rate of increase in fluorescence can be measured over time. Michaelis-Menton kinetic constants can be determined by the standard kinetic methods. The kinetic constants k_{cat}, Kₘ and k_{cat}/Kₘ can be calculated by graphing the inverse of the substrate concentration versus the inverse of the velocity of substrate cleavage, and fitting to the Lineweaver-Burk equation (1/velocity=(Kₘ/Vₘₐₓ)(1/[S])+1/Vₘₐₓ; where Vₘₐₓ=[ET]k_{cat}). The specificity constant (k_{cat}/Kₘ) is a measure of how well a substrate is cut by a particular protease.

[0412] In one embodiment, a non-target substrate cleavage sequence can be a native substrate cleavage sequence, such as a cleavage sequence recognized by wildtype MT-SP1. For example, efficient auto-activation of MT-SP1 entails recognition and cleavage of an Arg-Gln-Ala-Arg P4-P1 target sequence. MT-SP1 also can efficiently activate the proteinase-activated receptor-2 (PAR2), single chain uPA, and the hepatocyte growth factor/scatter factor. These extracellular surface-localized proteins display the P4 to P1 target sequences Ser-Lys-Gly-Arg, Pro-Arg-Phe-Lys, and Lys-Gln-Gly-Arg, respectively, which match closely the MT-SP1 cleavage specificity requirements observed for small peptidic substrates. In one embodiment, a fluorogenically tagged tetrapeptide of RQAR (SEQ ID NO: 401), or SLGR (SEQ ID NO: 392), or PRFK (SEQ ID NO: 402), or KQGR (SEQ ID NO: 403) can be used as a non-target substrate cleavage sequence.

[0413] In another embodiment, any one or more of the cleavage sequences of a complement protein can be determined and used as a desired target cleavage sequence. For example, any one or more of the Factor I cleavage sequences, such as for example SLLR (SEQ ID NO: 389), LPSR (SEQ ID NO: 388), and HRGR (SEQ ID NO: 390) can be used as a fluorogenically tagged tetrapeptide target cleavage sequence. In another example, the desired cleavage sequence in a complement protein targeted by any one or more wildtype or modified protease can be empirically determined by N-terminally sequencing cleavage products upon cleavage of any one or more of the complement proteins by a protease. In such an example, any one or more of the cleavage sequences identified as target cleavage sequences of a protease provided herein can be used, including those described in Example 3. Therefore, for example, a fluorogenically tagged tetrapeptide of GATR (SEQ ID NO: 391), SLGR (SEQ ID NO: 392), VFAK (SEQ ID NO: 393), REFK (SEQ ID NO: 394), QHAR (SEQ ID NO: 398), GLAR (SEQ ID NO: 395), RLGR (SEQ ID NO: 396), AEGK (SEQ ID NO: 397), or HRGR (SEQ ID NO: 390) can be used as a target substrate cleavage sequence.

[0414] In an additional embodiment, a full length complement protein can be used as a target substrate to assay for protease specificity compared to a full length native target substrate of a protease. Further, a full length complement protein can be used to assess the correlation between substrate specificity and cleavage by a protease of a full length target substrate versus a four amino acid P1-P4 substrate cleavage sequence contained within the target substrate. In one example, a full length C2 protein can be used as a desired cleavage target of any one or more or the proteases to assess specificity. In this example, cleavage of C2 by a modified or scaffold protease can be compared to cleavage of another full-length substrate, or the cleavage can be compared to a fluorogenic tetrapeptide cleavage sequence of C2, such as those described in Example 11 (i.e., GATR, SLGR, or VFAK). The specificity constant of cleavage of a full length protein by a protease can be determined by using gel densitometry to assess changes in densitometry over time of a full-length target substrate band incubated in the presence of a protease.

[0415] 3. Protease Polypeptides

[0416] Using the methods described herein, proteases are provided that cleave any one or more of the complement proteins, whereby cleavage of the complement protein inhibits complement activation. As provided herein, a protease polypeptide that cleaves any one or more of the complement proteins is a non-complement protease. A protease polypeptide can include the amino acid sequence of a scaffold protease whose sequence is provided herein, such as in any one of SEQ ID NOS: 2, 4, 8, 71, 73, 75, 77, 79, 81, 83, 85, 87, 89, 91, 93, 95, 97, 99, 101, 103, 105, 107, 109, 111, 113, 115, 117, 119, 121, 123, 125, 127, 128, 130, 132, 134, 136, 138, 140, 142, 144, 146, 148, 150, 152, 154, 156, 158, 160, 162, 164, 166, 168, 170, 172, 174, 176, 178, 180, 182, 184, 186, 188, 190, 192, 194, 196, 198, 200, 202, 204, 206, 208, 210, 212, 214, 216, 218, 220, 222, 224, 226, 228, 230, 232, 234, 236, 238, 240, 242, 244, 246, 248, 250, 252, 254, 256, 258, 260, 262, 264, 266, 268, 269, 270, 272, 274, 276, 278, 280, 282, 284, 286, 287, 289, 291, 293, 295, 297, 373, 375, 377, 379, 381, 383, 385, 387, 544, 545, 547, 549, and 551, or a catalytically active portion thereof. For example, the scaffold protease can be a wildtype or prominent form of the protease. In another embodiment, the scaffold protease can be an allelic variant of a protease. The scaffold protease is of mammalian origin, particularly human origin, although the scaffold protease polypeptide sequence also can be from any one or more of hamster, mouse, rat, cow, monkey, orangutan, baboon, chimpanzee, macaque, gibbon or gorilla origin. In other embodiments, the scaffold protease can be from non-mammalian origin such as from a plant or parasite.

[0417] In one embodiment, a protease scaffold is modified to have increased specificity and/or selectivity to any one or more complement proteins compared to the scaffold protease, while still encoding a protein that maintains its protease activity. Modified protease polypeptides include those with 1, 2, 3, 4, 5, 6, 7, 8, 9, 10, 11, 12, 13, 14, 15, 16, 17, 18, 19, 20 or more modified positions. Generally, a modified protease includes any variant in which residues at a particular position in the sequence have been substituted by other amino acids, and further include the possibility of inserting an additional residue or residues between two residues of the wildtype protease protein as well as the possibility of deleting one or more residues form the wildtype protease sequence. Any amino acid substitution, insertion, or deletion of a wildtype protease sequence is provided herein.

[0418] Provided herein are modified polypeptides that contain a full length sequence of a scaffold protease, but that contain modifications in any one or more amino acids that contribute to substrate specificity and/or selectivity. In one embodiment, the modified protease polypeptides provided herein have increased substrate specificity and/or selectivity for any one or more complement protein compared to a scaffold protease, whereby cleavage of a complement protein inhibits complement activation. In another embodiment, a modified protease polypeptide has a greater specificity for cleavage of a complement protein compared to a VEGF or VEGFR. In an additional embodiment, the modified proteases provided herein do not cleave a VEGF or VEGFR. Further, a modified protease polypeptide provided herein containing modifications in any one or more amino acids that contribute to substrate specificity and/or selectivity, also can contain other modifications in regions that are non-essential to the substrate specificity of a protease.

[0419] Modified protease polypeptides provided herein also can contain a catalytically active portion of a full-length scaffold or unmodified protease. When the polypeptide includes a catalytically active portion it can include other non-protease portions in addition thereto as long as the resulting polypeptide exhibits protease activity at least 1%, 2%, 5%, 10%, 20%, 50%, 100% or more of the full-length polypeptide. In addition the catalytically active portion is less than the full-length by at least one amino acid, and can be less than the full-length protease domain as long as protease activity is retained. A catalytically active portion of a protease containing modifications in any one or more amino acids that contribute to substrate specificity can be an active single-chain or double-chain form of a scaffold protease. In some embodiments, a modified protease can be substituted into another polypeptide, either at the N- or C-terminus, such as in a fusion protein. In additional embodiments, a modified polypeptide protease, such as for example a catalytically active portion thereof of a modified protease, can be inserted to replace the protease domain from another protease.

[0420] Provided herein are proteases exhibiting increased specificity and/or selectivity to any one or more complement proteins having a sequence of amino acids encompassed in any one of SEQ ID NOS: 298, 299, 300, 302, 304, 305, 306, 311, 312, 313, 314, 315, 316, 317, 318, 319, 320, 321, 322, 326, 328, 330, 332, 334, 335, 338, 340, 344, 660-662 or a fragment thereof that exhibits complement activity.

[0421] a. MT-SP1 Polypeptides

[0422] Provided herein are MT-SP1 polypeptides that cleave any one or more of the complement proteins, whereby cleavage of the complement protein inhibits complement activation. An MT-SP1 polypeptide provided herein can be a full-length MT-SP1 polypeptide (SEQ ID NO:2) or can be a fragment or partial sequence of full-length MT-SP1 that exhibits catalytic activity. In one example, an MT-SP1 polypeptide can be a single-chain protease domain of MT-SP1 (SEQ ID NO: 10). In another embodiment, an MT-SP1 polypeptide can be any one or more of the allelic variants of MT-SP1 as set forth in SEQ ID NO:448.

[0423] Also provided herein are modified MT-SP1 polypeptides containing modifications in any one or more amino acids of a scaffold MT-SP1 polypeptide using any one of the methods described herein. In one embodiment, the modifications can be made in a scaffold MT-SP1 set forth in SEQ ID NO:2, or can be made in any allelic variant of a wildtype MT-SP1 such as for example any one of the allelic variants set forth in SEQ ID NO:448. A modified MT-SP1 polypeptide provided herein can constitute a full-length sequence of an MT-SP1 scaffold, or can constitute a catalytically active portion thereof of a full-length MT-SP1 scaffold protease. The modified MT-SP1 exhibits an increase in the specificity and/or selectivity to any one or more of the complement proteins compared to a MT-SP1 scaffold, whereby cleavage of the protein inhibits complement activation.

[0424] Provided herein are modified MT-SP1 polypeptides with 1, 2, 3, 4, 5, 6, 7, 8, 9, 10, 11, 12, 13, 14, 15, 16, 17, 18, 19, 20 or more modified positions. In one embodiment, a modified MT-SP1 polypeptide includes mutation of any one or more amino acids in the extended substrate binding pocket of MT-SP1 including, for example, modification of any one or more amino acid residues of 195, 102, 57 (the catalytic triad); 189, 190, 191, 192, 216 and 226 (S1); 57, 58, 59, 60, 61, 62, 63, 64, 99 (S2); 146, 192, 217, 218 (S3); 96, 97, 98, 99, 100, 168, 169, 170, 170A, 171, 172, 173, 174, 175, 176, 178, 179, 180, 215, 217, 224 (S4), based on chymotrypsin numbering. Modifications in the protease domain of MT-SP1 to alter substrate specificity and/or selectivity also include modification of any one or more amino acid residues of 41, 60c, 143, 147, 151 or 221a, based on chymotrypsin numbering.

[0425] Provided herein are modified MT-SP1 polypeptides where the following amino acid residues were identified in the protease domain of MT-SP1 as increasing the specificity and/or selectivity of cleavage of any one or more complement protein thereby inhibiting complement activation: 41, 60c, 97, 143, 146, 147, 151, 172, 175, 192, 217, 221a, and 224 based on chymotrypsin numbering. The modified MT-SP1 polypeptides exhibit increased specificity and/or selectivity towards any one or more of the complement components compared to a wildtype MT-SP1 of SEQ ID NO: 2 or a catalytically active portion thereof set forth in SEQ ID NO:10. Thus, provided herein are modified MT-SP1 polypeptides exhibiting increased specificity and/or selectivity towards any one or more complement components containing a modification at an amino acid position corresponding to any one or more amino acid residues selected from among I41, R60c, F97, H143, Y146, G147, G151, L172, Q175, Q192, D217, Q221a or K224 in an MT-SP1 set forth in SEQ ID NO: 2 or SEQ ID NO:10, based on chymotrypsin numbering. In one embodiment, amino acid replacement or replacements correspond to any of the following positions: I41T, I41A, I41L, I41F, I41D, I41E, R60_{C}D, R60_{C}W, F97D, F97E, F97A, F97W, H143V, Y146N, Y146D, Y146E, Y146A, Y146W, Y146R, Y146F, G147E, G151L, L172N, Q175D, Q175E, Q175H, Q175L, Q175F, Q175W, Q175Y, Q175R, Q175K, Q192A, Q192R, Q192V, Q192F, D217F, Q221ₐD, Q221ₐL, Q221ₐE, K224A, K224L, K224R, K224N, K224T, K224Y, K224S and K224F of the protease domain of MT-SP1 based on chymotrypsin numbering. Table 16 provides non-limiting examples of amino acid replacements that increase specificity and/or selectivity to any one or more complement protein, including SEQ ID NOS for exemplary polypeptide sequences and the encoding nucleic acid sequences.

TABLE 16

| | | | Catalytically |
|---|---|---|---|
| | | Full-length | active portion |
| | | SEQ ID NOS: | SEQ ID NOS: |
| ID # | Modification | (aa, nt) | (aa, nt) |
| CB200 | wildtype | 1, 2 | 10, 9 |
| CB12 | F97D | 406, 482 | 16, 15 |
| CB13 | F97E | 407, 483 | 18, 17 |
| CB16 | Y146F | 646 | 592 |
| CB17 | L172N | 647 | 593 |
| CB20 | Q175D | 636 | 582 |
| CB21 | Q175E | 635 | 581 |
| CB31 | F97A | 408, 484 | 20, 19 |
| CB32 | F97W | 409, 485 | 22, 21 |
| CB40 | Y146N | 410, 486 | 24, 23 |
| CB41 | Y146D | 411, 487 | 26, 25 |
| CB42 | Y146E | 412, 488 | 28, 27 |
| CB43 | Y146A | 413, 489 | 30, 29 |
| CB44 | Y146W | 414, 490 | 32, 31 |
| CB45 | Y146R | 415, 491 | 34, 33 |
| CB62 | Q192V | 405, 481 | 14, 13 |
| CB64 | Q192R | 416, 492 | 36, 35 |
| CB66 | K224A | 417, 493 | 38, 37 |
| CB67 | K224F | 418, 494 | 40, 39 |
| CB80 | R60_{c}D | 623 | 569 |
| CB82 | R60_{c}W | 621 | 567 |
| CB268 | Q221aD | 614 | 560 |
| CB274 | G147E | 622 | 568 |

[0426] Also provided herein are modified MT-SP1 polypeptides where the following amino acid residues were identified in the substrate binding site S1-S4 of MT-SP1 as increasing the specificity and/or selectivity of cleavage of any one or more complement protein containing a SLLR/SE Factor I cleavage sequence, thereby inhibiting complement activation: 96, 174, 217, 146, 192, and 99, based on chymotrypsin numbering. The modified MT-SP1 polypeptides exhibit increased specificity and/or selectivity towards a C3b or iC3 complement protein substrate compared to a native target substrate of wildtype MT-SP1 of SEQ ID NO: 2 or a catalytically active portion thereof set forth as SEQ ID NO:10. In one embodiment, amino acid replacement or replacements correspond to any of the following positions: D96A, D96V, D96F, D96S, D96T, Q174H, D217Q, D217N, D217H, Q192L, Q192I, Q192F, F99A, F99V, F99S, or F99G of the protease domain of MT-SP1 based on chymotrypsin numbering. Table 17 provides non-limiting examples of amino acid replacements that increase specificity and/or selectivity to any one or more complement protein, including SEQ ID NOS for exemplary polypeptide sequences and the encoding nucleic acid sequences.

TABLE 17

| | Full-length | Catalytically |
|---|---|---|
| | SEQ ID | active portion |
| Modification | NOS: | SEQ ID NOS: |
| D96A | 423, 499 | 45, 455 |
| D96V | 424, 500 | 46, 456 |
| D96F | 425, 501 | 47, 457 |
| D96S | 426, 502 | 48, 458 |
| D96T | 427, 503 | 49, 459 |
| Q174H | 419, 495 | 41, 451 |
| D217Q | 420, 496 | 42, 452 |
| D217N | 421, 497 | 43, 453 |
| D217H | 422, 498 | 44, 454 |
| Q192L | 428, 504 | 50, 460 |
| Q192I | 429, 505 | 51, 461 |
| Q192F | 430, 506 | 52, 462 |
| Y146F | 431, 507 | 53, 463 |
| F99A | 432, 508 | 54, 464 |
| F99V | 433, 509 | 55, 465 |
| F99S | 434, 510 | 56, 466 |
| F99G | 435, 511 | 57, 467 |

[0427] Also provided herein are modified MT-SP1 polypeptides where the following amino acid residues were identified in the substrate binding site S1-S4 of MT-SP1 as increasing the specificity and/or selectivity of cleavage of any one or more complement protein containing a LPSR/KI Factor I cleavage sequence, thereby inhibiting complement activation: 174, 180, 215, 192, and 99, based on chymotrypsin numbering. The modified MT-SP1 polypeptides exhibit increased specificity and/or selectivity towards a C3b or iC3 complement protein substrate compared to a native target substrate of wildtype MT-SP1 of SEQ ID NO: 2 or a catalytically active portion thereof set forth as SEQ ID NO:10. In one embodiment, amino acid replacement or replacements correspond to any of the following positions: Q174F, Q174V, Q174L, Q174Y, M180E, W215F, W215Y, Q192K, Q192R, Q192Y, or F99Y of the protease domain of MT-SP1 based on chymotrypsin numbering. Table 18 provides non-limiting examples of amino acid replacements that increase specificity and/or selectivity to any one or more complement protein, including SEQ ID NOS for exemplary polypeptide sequences and the encoding nucleic acid sequences.

TABLE 18

| | Full-length | Catalytically |
|---|---|---|
| | SEQ ID | active portion |
| Modification | NOS: | SEQ ID NOS: |
| Q174F | 440, 516 | 62, 472 |
| Q174V | 439, 515 | 61, 471 |
| Q174L | 529, 539 | 524, 534 |
| Q174Y | 530, 540 | 525, 535 |
| M180E | 531, 541 | 526, 536 |
| W215F | 436, 512 | 58, 468 |
| W215Y | 437, 513 | 59, 469 |
| Q192K | 532, 542 | 527, 537 |
| Q192R | 416, 492 | 35, 36 |
| Q192Y | 533, 543 | 528, 538 |
| F99Y | 447, 523 | 69, 479 |

[0428] Also provided herein are modified MT-SP1 polypeptides where the following amino acid residues were identified in the substrate binding site S1-S4 of MT-SP1 as increasing the specificity and/or selectivity of cleavage of any one or more complement protein containing a HRGR/TL Factor I cleavage sequence, thereby inhibiting complement activation: 174, 215, 192, 217, and 99 based on chymotrypsin numbering. The modified MT-SP1 polypeptides exhibit increased specificity and/or selectivity towards a C4b or iC4 complement protein substrate compared to a native target substrate of wildtype MT-SP1 of SEQ ID NO: 2 or a catalytically active portion thereof set forth as SEQ ID NO:10. In one embodiment, amino acid replacement or replacements correspond to any of the following positions: W215F, W215Y, Q174A, Q174V, Q174F, Q174R, Q174K, D217A, D217V, Q192E, F99W, and F99Y of the protease domain of MT-SP1 based on chymotrypsin numbering. Table 19 provides non-limiting examples of amino acid replacements that increase specificity and/or selectivity to any one or more complement protein, including SEQ ID NOS for exemplary polypeptide sequences and the encoding nucleic acid sequences.

TABLE 19

| | Full-length | Catalytically |
|---|---|---|
| | SEQ ID | active portion |
| Modification | NOS: | SEQ ID NOS: |
| W215F | 436, 512 | 58, 468 |
| W215Y | 437, 513 | 59, 469 |
| Q174A | 438, 514 | 60, 470 |
| Q174V | 439, 515 | 61, 471 |
| Q174F | 440, 516 | 62, 472 |
| Q174R | 441, 517 | 63, 473 |
| Q174K | 442, 518 | 64, 474 |
| D217A | 443, 519 | 65, 475 |
| D217V | 444, 520 | 66, 476 |
| Q192E | 445, 521 | 67, 477 |
| F99W | 446, 522 | 68, 478 |
| F99Y | 447, 523 | 69, 479 |

[0429] In one embodiment, modified proteases can be combined such as, for example, to acquire the specificity of multiple proteases. A mutation at one residue of a protease scaffold, which produces specificity at one site of a substrate sequence, can be combined in the same protease with another mutation at another site of the protease scaffold sequence to make a combined specificity protease. Any number of mutations at discrete sites on the same protease scaffold an be used to create a combined specificity protease. A modified protease can contain 2, 3, 4, 5, 6, 7, 8, 9, 10, 11, 12, 13, 14, 15, 16, 17, 18, 19, 20, or more mutations by combining any two or more mutations identified as contributing to substrate specificity and/or selectivity of the protease.

[0430] For example, a modified MT-SP1 protease can contain any two or more mutations, such as any two or more mutations set forth above, to generate a combined protease. Provided herein are modified MT-SP1 polypeptides having two or more modifications corresponding to any of positions 41, 60c, 96, 97, 99, 143, 146, 147, 151, 172, 174, 175, 192, 215, 217, 221a, and 224, based on chymotrypsin numbering. The modified MT-SP1 polypeptide exhibits increased specificity and/or selectivity to any one or more complement components compared to a scaffold or wildtype MT-SP1 of SEQ ID NO: 2 or a catalytically active portion thereof set forth in SEQ ID NO: 10. Thus, provided herein are modified MT-SP1 polypeptides exhibiting increased specificity and/or selectivity towards any one or more complement components containing two or more modifications at an amino acid position corresponding to any two or more amino acid residues selected from among I41, R60_{C}, D96, F97, F99, H143, Y146, G147, G151, L172, Q174, Q175, Q192, W215, D217, Q221ₐ or K224 in an MT-SP1 set forth in SEQ ID NO: 2 or SEQ ID NO:10, based on chymotrypsin numbering. In some examples, a modified MT-SP1 containing two or more modifications contains a modification at or or both of position Y146 and K224. In another example, a modified MT-SP1 containing two or more modifications contains a modification at position G151. Modified MT-SP1 polypeptides can be generated using any of the methods disclosed herein. Table 20 provides non-limiting examples of amino acid replacements that increase specificity and/or selectivity to any one or more complement protein, including SEQ ID NOS for exemplary polypeptide sequences and the encoding nucleic acid sequences.

TABLE 20

| | | | Catalytically |
|---|---|---|---|
| | | Full- | active |
| | | length | portion |
| | | SEQ ID | SEQ |
| ID # | Modification | NOS: | ID NOS: |
| CB155 | Y146D/K224F | 404, 480 | 11, 12 |
| CB212 | Y146N/K224F | 655 | 601 |
| CB213 | Y146E/K224F | 642 | 588 |
| CB214 | Y146A/K224F | 643 | 589 |
| CB216 | Q192V/K224F | 659 | 605 |
| CB218 | Q192F/K224F | 657 | 603 |
| CB219 | Y146D/Q192A/K224F | 658 | 604 |
| CB232 | Y146E/K224L | 620 | 566 |
| CB235 | Y146E/K224A | 630 | 576 |
| CB238 | Y146D/K224L | 628 | 574 |
| CB244 | Y146D/K224R | 617 | 563 |
| CB245 | Y146D/K224N | 637 | 583 |
| CB251 | Y146E/K224R | 615 | 561 |
| CB252 | Y146E/K224N | 606 | 552 |
| CB255 | Y146E/K224T | 644 | 590 |
| CB257 | Y146E/K224Y | 633 | 579 |
| CB331 | I41D/Y146D/K224L | 653 | 599 |
| CB332 | I41E/Y146D/K224L | 639 | 585 |
| CB349 | I41D/Y146D/K224F | 654 | 600 |
| CB350 | I41E/Y146D/K224F | 652 | 598 |
| CB351 | I41T/Y146D/K224F | 608 | 554 |
| CB353 | H143V/Y146D/K224F | 641 | 587 |
| CB357 | I41T/Y146D/K224L | 626 | 572 |
| CB367 | Y146D/Q175D/K224R | 624 | 570 |
| CB373 | Y146E/Q175D/K224R | 619 | 565 |
| CB377 | Y146E/Q175D/K224N | 616 | 562 |
| CB381 | Y146D/Q175H/K224L | 631 | 577 |
| CB383 | Y146D/Q175L/K224L | 625 | 571 |
| CB385 | Y146D/Q175F/K224L | 634 | 580 |
| CB387 | Y146D/Q175W/K224L | 627 | 573 |
| CB388 | Y146D/Q175Y/K224L | 632 | 578 |
| CB403 | Y146D/D217F/K224L | 640 | 586 |
| CB409 | I41A/Y146D/K224F | 651 | 597 |
| CB412 | I41L/Y146D/K224F | 649 | 595 |
| CB413 | I41F/Y146D/K224F | 648 | 594 |
| CB421 | I41T/Y146D/Q175D/K224F | 656 | 602 |
| CB422 | I41T/Y146E/Q175D/K224N | 609 | 555 |
| CB423 | I41T/Y146E/K224L | 645 | 591 |
| CB450 | I41T/I46D/G151L/K224F | 650 | 596 |
| CB451 | Y146D/Q221aL/K224S | 638 | 584 |
| CB458 | Y146E/Q221aE/K224R | 629 | 575 |
| CB464 | Y146E/Q221aE/k224F | 611 | 557 |
| CB476 | I41T/Y146D/Q175D/K224L | 663 | 672 |
| CB477 | I41T/Y146D/Q175D/K224R | 664 | 673 |
| CB478 | I41T/Y146D/Q175D/K224N | 665 | 674 |
| CB480 | I41T/Y146D/G151L/Q175D/K224F | 666 | 675 |
| CB481 | I41T/Y146D/G151L/Q175D/K224L | 667 | 676 |
| CB482 | I41T/Y146D/G151L/Q175D/K224R | 668 | 677 |
| CB483 | I41T/Y146D/G151L/Q175D/K224N | 669 | 678 |
| CB484 | I41T/Y146E/Q175D/K224F | 670 | 679 |
| CB485 | I41T/Y146E/Q175D/K224L | 671 | 680 |
| CB486 | I41T/Y146E/Q175D/K224R | 607 | 553 |
| CB487 | I41T/Y146E/G151L/Q175D/K224N | 613 | 559 |
| CB488 | I41T/Y146E/G151L/Q175D/K224F | 618 | 564 |
| CB489 | I41T/Y146E/G151L/Q175D/K224L | 610 | 556 |
| CB490 | I41T/Y146E/G151L/Q175D/K224R | 612 | 558 |
| | I41T/Y146D/G151L/K224N | 681 | 696 |
| | Y146D/Q175D/K224N | 682 | 697 |
| | I41T/Y146D/K224N | 683 | 698 |
| | Y146D/G151L/K224N | 684 | 699 |
| | Y146D/Q175R/K224N | 685 | 700 |
| | Y146D/Q175K/K224N | 686 | 701 |
| | Y146D/Q175H/K224N | 687 | 702 |
| | I41T/Y146D/G151L/Q175K/K224F | 688 | 703 |
| | I41T/Y146D/G151L/Q175R/K224F | 689 | 704 |
| | I41T/Y146D/G151L/Q175H/K224F | 690 | 705 |
| | I41T/Y146D/G151L/Q175Y/K224F | 691 | 706 |
| | I41T/Y146D/G151L/Q175K/K224N | 692 | 707 |
| | I41T/Y146D/G151L/Q175R/K224N | 693 | 708 |
| | I41T/Y146D/G151L/Q175H/K224N | 694 | 709 |
| | I41T/Y146D/G151L/Q175Y/K224N | 695 | 710 |

[0431] Provided herein are modified MT-SP1 polypeptides where the replacement(s) are made in an MT-SP1 polypeptide scaffold having a sequence of amino acids set forth in SEQ ID NO:2, where the modified MT-SP1 polypeptide exhibits increased specificity and/or selectivity to any one or more complement components compared to the unmodified protein. Also provided herein are modified MT-SP1 polypeptides containing replacement(s) in an MT-SP1 scaffold having a sequence of amino acids set forth in SEQ ID NO:10, where the modified MT-SP1 polypeptide exhibits increased specificity and/or selectivity to any one or more complement components compared to the unmodified protein. Such an MT-SP1 scaffold polypeptide is a catalytically active portions thereof of an MT-SP1 polypeptide. Exemplary modified MT-SP1 polypeptides provided herein containing modification(s) of a a catalytically active portion thereof of a full-length MT-SP scaffold have a sequence of amino acids as set forth in any one of SEQ ID NOS: 12, 14, 16, 18, 20, 22, 24, 26, 28, 30, 32, 34, 36,38, 40-69, 524-528, 552-605, 672-680, or 696-710. Exemplary modified MT-SP1 polypeptides provided herein containing modification(s) of a full-length MT-SP1 scaffold have a sequence of amino acids as set forth in any one of SEQ ID NOS: 404-418-447, 529-533, 606-659, 663-671, or 681-695.

E. Assays to Assess or Monitor Modified Protease Activities on Complement-Mediated Functions

[0432] A modified protease can exhibit alterations in specificity and/or selectivity to any one or more complement proteins and thereby inactivate any one or more complement proteins compared to the corresponding full-length, scaffold or wildtype form of the complement protein. Modified proteases retain their protease activity, but can exhibit an increased specificity and/or selectivity to any one or more complement proteins. Exemplary proteases specifically cleave any one or more complement protein and thereby alter the activity of a complement protein. All such scaffold or modified proteases with increased specificity and/or selectivity to any one or more complement protein are candidate therapeutics.

[0433] Where the protease exhibits an increased specificity and/or selectivity to any one or more complement protein, in vitro and in vivo assays can be used to monitor or screen proteases for effects on complement-mediated functions. Such assays are well known to those of skill in the art. One of skill in the art can test a particular scaffold or modified protease for cleavage of any one or more complement protein and/or test to assess any change in the effects of a protease on a complement-mediated activity compared to the absence of a protease. Some such assays are exemplified herein.

[0434] Exemplary in vitro and in vivo assays are provided herein for comparison of an activity of a scaffold or modified protease on the function of any one or more targeted complement proteins. Many of the assays are applicable to other proteases and modified proteases. In addition, numerous assays, such as assays for measuring complement activation, are known to one of skill in the art. Assays for activities of complement include, but are not limited to, assays that measure activation products of complement activation, such as for example the C5b-9 MAC complex, and generation of any one or more of the complement cleavage products such as C4a, C5a, C3b, and C3d. Assays to measure complement activation also include functional assays that measure the functional activity of specific components of the complement pathways, such as for example hemolytic assays used to measure activation of any one of the classical, lectin or alternative pathways. Assays to assess effects of proteases and modified proteases on complement proteins and/or complement-mediated functions include, but are not limited to, SDS-analysis followed by Western Blot or Coomassie Brilliant Blue staining, enzyme immunoassays, and hemolytic assays. In one example, in vitro assays can be performed using purified complement proteins. In another example, in vivo assays can be performed by testing the serum of a species, including mammalian or human species, for functional activation of complement. Exemplary assays are described below.

[0435] a. Protein Detection

[0436] Protein detection is a means to measure individual complement components in a sample. Complement proteins can be detected to assess directly the effects of a scaffold or modified protease on cleavage of the proteins, or alternatively, complement proteins can be measured as a means to assess for complement activation. Complement proteins, treated in the presence or absence of a scaffold or modified protease, can be analyzed by any one or more assays including SDS-PAGE followed by Coomassie staining or Western Blot, enzyme immunoassay, immunohistochemistry, flow cytometry, nephelometry, agar gel diffusion, or radial immunodiffusion. Exemplary assays for protein detection are described below.

[0437] i. SDS-PAGE Analysis

[0438] Analysis of complement proteins in the presence or absence of increasing concentrations of a scaffold or modified protease can be performed by analysis of proteins on SDS-PAGE followed by detection of those proteins. In such examples, complement proteins can be detected by staining for total protein, such as by Coomasie Brilliant Blue stain, Silver stain, or by any other method known to one of skill in the art, or by Western Blot using polyclonal or monoclonal antibodies specific for a specified protein. Typically, a purified complement protein, such as for example any one or more of the proteins involved in the complement pathways, can be incubated in the presence or absence of a scaffold or modified protease. The treated complement protein can be resolved on an SDS-PAGE gel followed by a method to detect protein in the gel, for example, by staining with Coomasie Brilliant blue. The treated protein can be compared to its cognate full length protein and the degradation products formed by protease cleavage of the protein can be determined.

[0439] In another embodiment, a sample, such as for example human serum or plasma, can be treated in the presence or absence of a scaffold or modified protease or can be collected after treatment of an animal or a human with or without a protease. The protease-treated sample can be analyzed on SDS-PAGE and a specific complement protein can be detected, such as for example C1q, MBL, C2, C3, C4, C5, or Factor B, by Western Blot using monoclonal or polyclonal antibodies against the protein. The cleavage of the complement protein can be compared to a sample that was not treated with a protease. Additionally, the sample can be stimulated to initiate complement activation such as by incubation with IgG which stimulates activation of the classical pathway or by LPS which stimulates activation of the alternative pathway. The sample can be resolved by SDS-PAGE for detection of any one or more of the native complement proteins to determine the presence or absence of cleavage products of a specified protein compared to a sample of the protein not treated with a protease. In such examples, cleavage effector molecules of native complement proteins also can be analyzed by Western Blot using monoclonal and polyclonal antibodies to assess the activation of one or more of the complement pathways. Examples of complement effector molecules can include, but are not limited to, C3a, C3d, iC3b, C4d, Bb, and C5-b9. For example, a decreased expression in a sample of C4d can indicate that a scaffold or modified protease inhibited the activation of one or more of the classical or lectin pathway of complement. In another example, a decreased expression in a sample of Bb can indicate that a scaffold or modified protease inhibited the activation of the alternative pathway of complement. The cleavage products of the effector molecules also can be determined to assess the effects of increasing concentrations of a scaffold or modified protease on the cleavage of complement effector molecule themselves.

[0440] ii. Enzyme Immunoassay

[0441] Enzyme immunoassay (EIA; also called enzyme-linked immunosorbent assay; ELISA) is an assay used to measure the presence of a protein in a sample. Typically, measurement of the protein is an indirect measurement of the binding of the protein to an antibody, which itself is chemically labeled with a detectable substrate such as an enzyme or fluorescent compound. EIA assays can be used to measure the effects of scaffold or modified proteases on complement activation by measuring for the presence of a complement effector molecule generated following complement activation. In such examples, a sample, such as for example human serum or plasma, can be pretreated in the presence or absence of increasing concentrations of a scaffold or modified protease and subsequently activated to induce complement activation by incubation with initiating molecules, or can be collected following treatment of an animal or a human with a protease. For example, the classical pathway can be activated by incubation with IgG and the alternative pathway can be activated by incubation of the sample with LPS. A complement activation assay specific for the lectin pathway requires that the classical pathway of complement is inhibited since the C4/C2 cleaving activity of the lectin pathway is shared with the classical pathway of complement. Inhibition of the classical pathway can be achieved using a high ionic strength buffer which inhibits the binding of C1q to immune complexes and disrupts the C1 complex, whereas a high ionic strength buffer does not affect the carbohydrate binding activity of MBL. Consequently, activation of the lectin pathway can be induced by incubation of a sample, such as human serum or plasma, with a mannan-coated surface in the presence of 1 M NaCl.

[0442] Following activation, the sample can be quenched with the addition of Pefabloc (Roche) and EDTA to minimize continued activation of the pathways. Samples can be analyzed for the presence of complement effector molecules by an EIA or ELISA assay. EIA and ELISA assays for measuring complement proteins are well known to one skilled in the art. Any complement activation product can be assessed. Exemplary complement activation products for measurement of complement activation include iC3b, Bb, C4d, C5b-9, C3a, C3a-desArg, C4a-desArg, and C5a-desArg. The complement pathway activated can be determined depending on the complement activation product measured. For example, measurement of Bb cleavage product is a unique marker of the alternative pathway.

[0443] In some examples, the EIA can be paired with detection of the cleaved complement proteins by analysis of the protease-treated, complement-stimulated sample by SDS-PAGE followed by Western blot analysis for identification of specific complement components. Using densitometry software, the cleavage of the complement product can be compared to the full length complement component cleaved throughout the assay and the appearance of all major degradation products and the percentage cleavage can be determined.

[0444] iii. Radial Immunodiffusion (RID)

[0445] Radial immunodiffusion (RID) is a technique that relies on the precipitation of immune complexes formed between antibodies incorporated into agarose gels when it is poured, and antigen present in a test sample resulting in a circular precipitin line around the sample well. The diameter of the precipitin ring is proportional to the concentration of the antibody (or antigen) present in the test sample. By comparing the diameter of the test specimen precipitin ring to known standards, a relatively insensitive estimation of the concentration of specific antibody or antigen can be achieved. RID can be used to measure the amount of a complement protein in a sample. For example, a sample such as for example human serum or plasma, can be treated in the presence or absence of increasing concentrations of a scaffold or modified protease. The protease-treated sample can be added to a well of an agarose gel that has been made to incorporate a polyclonal or monoclonal antibody against any one of the complement proteins such as including, but not limited to, C1q, C1r, C1s, C2, C3, C4, C5, C6, C7, C9, or Factor B. After removal of unprecipitated proteins by exposure to 0.15 M NaCl, the precipitated protein rings can be assessed by staining with a protein dye, such as for example Coomassie Brilliant blue or Crowles double stain.

[0446] b. Hemolytic Assays

[0447] Functional hemolytic assays provide information on complement function as a whole. This type of assay uses antibody-sensitized or unsensitized sheep erythrocytes. Hemolytic assays include the total hemolytic complement assay (CH50), which measures the ability of the classical pathway and the MAC to lyse a sheep RBC. It depends on the sequential activation of the classical pathway components (C1 through C9) to lyse sheep erythrocytes that have been sensitized with optimal amounts of rabbit anti-sheep erythrocyte antibodies to make cellular antigen-antibody complexes. Hemolytic assays also can include an alternative pathway CH50 assay (rabbit CH50 or APCH50), which measures the ability of the alternative pathway and the MAC to lyse a rabbit RBC. One CH50 and/or APCH50 unit is defined as the quantity or dilution of serum required to lyse 50% of the red cells in the test. Typically, to assess complement activation, a sample, such as for example human serum or human plasma, can be treated in the presence or absence of increasing concentrations of a scaffold or modified protease, or can be collected following treatment of an animal or human in the presence or absence of a protease. The protease-treated sample can be subsequently mixed with sheep's red blood cells that have been activated or sensitized with IgG. A water only sample mixed with sheep red blood cells can act as a total lysis control in order to accurately assess percent lysis of the samples analyzed. The addition of 0.15M NaCl to the sample can be added to stop the lysing reaction. Lysis of the red blood cells, induced by the activation of the terminal components of the complement pathway, can be assessed by measuring the release of hemoglobin. Measurement can be by optical density (OD) readings of the samples using a spectrophotometer at an OD of 415 nm.

[0448] In one embodiment, limiting dilution hemolytic assays can be used to measure functional activity of specific components of either pathway. In such an assay, a serum source is used that has an excess of all complement components, but is deficient for the one being measured in the sample, i.e. a media or serum source is complement-depleted for a specific protein. The extent of hemolysis is therefore dependent on the presence of the measured component in the test sample. In such an assay, a purified complement protein, such as for example any one of the native complement proteins including, but not limited to C1q, MBL, C2, C3, C4, or C5 can be incubated in the presence or absence of increasing concentrations of a scaffold or modified protease. The protease-treated purified complement protein can then be mixed with complement-depleted media or plasma and IgG-activated sheep red blood cells and hemolysis of the sample can be assessed as described above. In another embodiment, protease cleavage can be correlated with complement activation by assaying for hemolytic activity of a protease-treated sample, and subsequently analyzing the sample on SDS-PAGE gel followed by staining with a protein stain, such as for example Coomassie Blue. The purified complement protein treated with the proteases can be assessed for cleavage and the percentage of the full length complement component cleaved throughout the assay and the appearance of all major degradation products can be calculated. Alternatively, analysis of the protease-treated complement protein can be by Western blot.

[0449] An alternative to the hemolytic assay, called the liposome immunoassay (LIA), can be used to assess activation of the classical pathway. The LIA (Waco Chemicals USA, Richmond, Va.) utilizes dinitrophenyl (DNP)-coated liposomes that contain the enzyme glucose-6-phosphate dehydrogenase. When serum is mixed with the liposomes and a substrate containing anti-DNP antibody, glucose-6-phosphate, and nicotinamide adenine dinucleotide, activated liposomes lyse, and an enzymatic colorimetric reaction occurs which is proportional to total classical complement activity.

F. Methods of Producing Nucleic Acid Encoding Proteases and Methods of Producing Protease Polypeptides

[0450] Protease polypeptides, including modified MT-SP1 polypeptides, or domains thereof, can be obtained by methods well known in the art for protein purification and recombinant protein expression. Any method known to those of skill in the art for identification of nucleic acids that encode desired genes can be used. Any method available in the art can be used to obtain a full length (i.e., encompassing the entire coding region) cDNA or genomic DNA clone encoding a protease protein, such as from a cell or tissue source. Modified proteases can be engineered as described herein from a scaffold or wildtype protease, such as by site-directed mutagenesis.

[0451] Proteases can be cloned or isolated using any available methods known in the art for cloning and isolating nucleic acid molecules. Such methods include PCR amplification of nucleic acids and screening of libraries, including nucleic acid hybridization screening, antibody-based screening and activity-based screening.

[0452] Methods for amplification of nucleic acids can be used to isolate nucleic acid molecules encoding a protease, including for example, polymerase chain reaction (PCR) methods. A nucleic acid containing material can be used as a starting material from which a protease-encoding nucleic acid molecule can be isolated. For example, DNA and mRNA preparations, cell extracts, tissue extracts, fluid samples (e.g. blood, serum, saliva), samples from healthy and/or diseased subjects can be used in amplification methods. Nucleic acid libraries also can be used as a source of starting material. Primers can be designed to amplify a protease. For example, primers can be designed based on expressed sequences from which a protease is generated. Primers can be designed based on back-translation of a protease amino acid sequence. Nucleic acid molecules generated by amplification can be sequenced and confirmed to encode a protease.

[0453] Additional nucleotide sequences can be joined to a protease-encoding nucleic acid molecule, including linker sequences containing restriction endonuclease sites for the purpose of cloning the synthetic gene into a vector, for example, a protein expression vector or a vector designed for the amplification of the core protein coding DNA sequences. Furthermore, additional nucleotide sequences specifying functional DNA elements can be operatively linked to a protease-encoding nucleic acid molecule. Examples of such sequences include, but are not limited to, promoter sequences designed to facilitate intracellular protein expression, and secretion sequences designed to facilitate protein secretion. Additional nucleotide sequences such as sequences specifying protein binding regions also can be linked to protease-encoding nucleic acid molecules. Such regions include, but are not limited to, sequences to facilitate uptake of a protease into specific target cells, or otherwise enhance the pharmacokinetics of the synthetic gene.

[0454] The identified and isolated nucleic acids can then be inserted into an appropriate cloning vector. A large number of vector-host systems known in the art can be used. Possible vectors include, but are not limited to, plasmids or modified viruses, but the vector system must be compatible with the host cell used. Such vectors include, but are not limited to, bacteriophages such as lambda derivatives, or plasmids such as pBR322 or pUC plasmid derivatives or the Bluescript vector (Stratagene, La Jolla, Calif.). The insertion into a cloning vector can, for example, be accomplished by ligating the DNA fragment into a cloning vector which has complementary cohesive termini. Insertion can be effected using TOPO cloning vectors (INVITROGEN, Carlsbad, Calif.). If the complementary restriction sites used to fragment the DNA are not present in the cloning vector, the ends of the DNA molecules can be enzymatically modified. Alternatively, any site desired can be produced by ligating nucleotide sequences (linkers) onto the DNA termini; these ligated linkers can contain specific chemically synthesized oligonucleotides encoding restriction endonuclease recognition sequences. In an alternative method, the cleaved vector and protease protein gene can be modified by homopolymeric tailing. Recombinant molecules can be introduced into host cells via, for example, transformation, transfection, infection, electroporation and sonoporation, so that many copies of the gene sequence are generated.

[0455] In specific embodiments, transformation of host cells with recombinant DNA molecules that incorporate the isolated protease protein gene, cDNA, or synthesized DNA sequence enables generation of multiple copies of the gene. Thus, the gene can be obtained in large quantities by growing transformants, isolating the recombinant DNA molecules from the transformants and, when necessary, retrieving the inserted gene from the isolated recombinant DNA.

[0456] 1. Vectors and Cells

[0457] For recombinant expression of one or more of the protease proteins, the nucleic acid containing all or a portion of the nucleotide sequence encoding the protease protein can be inserted into an appropriate expression vector, i.e., a vector that contains the necessary elements for the transcription and translation of the inserted protein coding sequence. The necessary transcriptional and translational signals also can be supplied by the native promoter for protease genes, and/or their flanking regions.

[0458] Also provided are vectors that contain nucleic acid encoding the protease or modified protease. Cells containing the vectors also are provided. The cells include eukaryotic and prokaryotic cells, and the vectors are any suitable for use therein.

[0459] Prokaryotic and eukaryotic cells, including endothelial cells, containing the vectors are provided. Such cells include bacterial cells, yeast cells, fungal cells, Archea, plant cells, insect cells and animal cells. The cells are used to produce a protease or modified protease protein thereof by growing the above-described cells under conditions whereby the encoded protease protein is expressed by the cell, and recovering the expressed protease protein. For purposes herein, the protease can be secreted into the medium.

[0460] In one embodiment, vectors containing a sequence of nucleotides that encodes a polypeptide that has protease activity and contains all or a portion of the protease domain, or multiple copies thereof, are provided. Also provided are vectors that contain a sequence of nucleotides that encodes the protease domain and additional portions of a protease protein up to and including a full length protease protein, as well as multiple copies thereof. The vectors can be selected for expression of the scaffold or modified protease protein or protease domain thereof in the cell or such that the protease protein is expressed as a secreted protein. When the protease domain is expressed the nucleic acid is linked to nucleic acid encoding a secretion signal, such as the Saccharomyces cerevisiae α-mating factor signal sequence or a portion thereof, or the native signal sequence.

[0461] A variety of host-vector systems can be used to express the protein coding sequence. These include but are not limited to mammalian cell systems infected with virus (e.g. vaccinia virus, adenovirus and other viruses); insect cell systems infected with virus (e.g. baculovirus); microorganisms such as yeast containing yeast vectors; or bacteria transformed with bacteriophage, DNA, plasmid DNA, or cosmid DNA. The expression elements of vectors vary in their strengths and specificities. Depending on the host-vector system used, any one of a number of suitable transcription and translation elements can be used.

[0462] Any methods known to those of skill in the art for the insertion of DNA fragments into a vector can be used to construct expression vectors containing a chimeric gene containing appropriate transcriptional/translational control signals and protein coding sequences. These methods can include in vitro recombinant DNA and synthetic techniques and in vivo recombinants (genetic recombination). Expression of nucleic acid sequences encoding a scaffold or modified protease protein, or domains, derivatives, fragments or homologs thereof, can be regulated by a second nucleic acid sequence so that the genes or fragments thereof are expressed in a host transformed with the recombinant DNA molecule(s). For example, expression of the proteins can be controlled by any promoter/enhancer known in the art. In a specific embodiment, the promoter is not native to the genes for a protease protein. Promoters which can be used include but are not limited to the SV40 early promoter (Bernoist and Chambon, Nature 290:304-310 (1981)), the promoter contained in the 3′ long terminal repeat of Rous sarcoma virus (Yamamoto et al. Cell 22:787-797 (1980)), the herpes thymidine kinase promoter (Wagner et al., Proc. Natl. Acad. Sci. USA 78:1441-1445 (1981)), the regulatory sequences of the metallothionein gene (Brinster et al., Nature 296:39-42 (1982)); prokaryotic expression vectors such as the β-lactamase promoter (Jay et al., (1981) Proc. Natl. Acad. Sci. USA 78:5543) or the tac promoter (DeBoer et al., Proc. Natl. Acad. Sci. USA 80:21-25 (1983)); see also “Useful Proteins from Recombinant Bacteria”: in Scientific American 242:79-94 (1980)); plant expression vectors containing the nopaline synthetase promoter (Herrar-Estrella et al., Nature 303:209-213 (1984)) or the cauliflower mosaic virus 35S RNA promoter (Garder et al., Nucleic Acids Res. 9:2871 (1981)), and the promoter of the photosynthetic enzyme ribulose bisphosphate carboxylase (Herrera-Estrella et al., Nature 310:115-120 (1984)); promoter elements from yeast and other fungi such as the Gal4 promoter, the alcohol dehydrogenase promoter, the phosphoglycerol kinase promoter, the alkaline phosphatase promoter, and the following animal transcriptional control regions that exhibit tissue specificity and have been used in transgenic animals: elastase I gene control region which is active in pancreatic acinar cells (Swift et al., Cell 38:639-646 (1984); Ornitz et al., Cold Spring Harbor Symp. Quant. Biol. 50:399-409 (1986); MacDonald, Hepatology 7:425-515 (1987)); insulin gene control region which is active in pancreatic beta cells (Hanahan et al., Nature 315:115-122 (1985)), immunoglobulin gene control region which is active in lymphoid cells (Grosschedl et al., Cell 38:647-658 (1984); Adams et al., Nature 318:533-538 (1985); Alexander et al., Mol. Cell Biol. 7:1436-1444 (1987)), mouse mammary tumor virus control region which is active in testicular, breast, lymphoid and mast cells (Leder et al., Cell 45:485-495 (1986)), albumin gene control region which is active in liver (Pinckert et al., Genes and Devel. 1:268-276 (1987)), alpha-fetoprotein gene control region which is active in liver (Krumlauf et al., Mol. Cell. Biol. 5:1639-1648 (1985); Hammer et al., Science 235:53-58 1987)), alpha-1 antitrypsin gene control region which is active in liver (Kelsey et al., Genes and Devel. 1:161-171 (1987)), beta globin gene control region which is active in myeloid cells (Mogram et al., Nature 315:338-340 (1985); Kollias et al., Cell 46:89-94 (1986)), myelin basic protein gene control region which is active in oligodendrocyte cells of the brain (Readhead et al., Cell 48:703-712 (1987)), myosin light chain-2 gene control region which is active in skeletal muscle (Sani, Nature 314:283-286 (1985)), and gonadotrophic releasing hormone gene control region which is active in gonadotrophs of the hypothalamus (Mason et al., Science 234:1372-1378 (1986)).

[0463] In a specific embodiment, a vector is used that contains a promoter operably linked to nucleic acids encoding a scaffold or modified protease protein, or a domain, fragment, derivative or homolog, thereof, one or more origins of replication, and optionally, one or more selectable markers (e.g., an antibiotic resistance gene). Vectors and systems for expression of the protease domains of the protease proteins include the well known Pichia vectors (available, for example, from Invitrogen, San Diego, Calif.), particularly those designed for secretion of the encoded proteins. Exemplary plasmid vectors for transformation of E. coli cells, include, for example, the pQE expression vectors (available from Qiagen, Valencia, Calif.; see also literature published by Qiagen describing the system). pQE vectors have a phage T5 promoter (recognized by E. coli RNA polymerase) and a double lac operator repression module to provide tightly regulated, high-level expression of recombinant proteins in E. coli, a synthetic ribosomal binding site (RBS II) for efficient translation, a 6×His tag coding sequence, t₀ and T1 transcriptional terminators, ColE1 origin of replication, and a beta-lactamase gene for conferring ampicillin resistance. The pQE vectors enable placement of a 6×His tag at either the N- or C-terminus of the recombinant protein. Such plasmids include pQE 32 (SEQ ID NO: 345), pQE 30, and pQE 31 which provide multiple cloning sites for all three reading frames and provide for the expression of N-terminally 6×His-tagged proteins. Other exemplary plasmid vectors for transformation of E. coli cells, include, for example, the pET expression vectors (see, U.S. Pat. No. 4,952,496; available from NOVAGEN, Madison, Wis.; see, also literature published by Novagen describing the system). Such plasmids include pET 11a, which contains the T7lac promoter, T7 terminator, the inducible E. coli lac operator, and the lac repressor gene; pET 12a-c, which contains the T7 promoter, T7 terminator, and the E. coli ompT secretion signal; and pET 15b and pET19b (NOVAGEN, Madison, Wis.), which contain a His-Tag™ leader sequence for use in purification with a His column and a thrombin cleavage site that permits cleavage following purification over the column, the T7-lac promoter region and the T7 terminator.

[0464] 2. Expression

[0465] Modified proteases can be produced by any method known to those of skill in the art including in vivo and in vitro methods. Modified proteases can be expressed in any organism suitable to produce the required amounts and forms of a modified protease needed for administration and treatment. Expression hosts include prokaryotic and eukaryotic organisms such as E. coli, yeast, plants, insect cells, mammalian cells, including human cell lines and transgenic animals. Expression hosts can differ in their protein production levels as well as the types of post-translational modifications that are present on the expressed proteins. The choice of expression host can be made based on these and other factors, such as regulatory and safety considerations, production costs and the need and methods for purification.

[0466] Many expression vectors are available and known to those of skill in the art and can be used for expression of modified proteases. The choice of expression vector will be influenced by the choice of host expression system. In general, expression vectors can include transcriptional promoters and optionally enhancers, translational signals, and transcriptional and translational termination signals. Expression vectors that are used for stable transformation typically have a selectable marker which allows selection and maintenance of the transformed cells. In some cases, an origin of replication can be used to amplify the copy number of the vector.

[0467] Modified proteases also can be utilized or expressed as protein fusions. For example, a protease fusion can be generated to add additional functionality to a protease. Examples of protease fusion proteins include, but are not limited to, fusions of a signal sequence, a tag such as for localization, e.g. a his₆ tag or a myc tag, or a tag for purification, for example, a GST fusion, and a sequence for directing protein secretion and/or membrane association.

[0468] In one embodiment, the protease can be expressed in an active form. In another embodiment, the protease is expressed in an inactive, zymogen form.

[0469] a. Prokaryotes

[0470] Prokaryotes, especially E. coli, provide a system for producing large amounts of proteins such as proteases or modified proteases. Transformation of E. coli is simple and rapid technique well known to those of skill in the art. Expression vectors for E. coli can contain inducible promoters, such promoters are useful for inducing high levels of protein expression and for expressing proteins that exhibit some toxicity to the host cells. Examples of inducible promoters include the lac promoter, the trp promoter, the hybrid tac promoter, the T7 and SP6 RNA promoters and the temperature regulated λPL promoter.

[0471] Modified proteases can be expressed in the cytoplasmic environment of E. coli. The cytoplasm is a reducing environment and for some molecules, this can result in the formation of insoluble inclusion bodies. Reducing agents such as dithiothreotol and β-mercaptoethanol and denaturants, such as guanidine-HCl and urea can be used to resolubilize the proteins. An alternative approach is the expression of a modified protease in the periplasmic space of bacteria which provides an oxidizing environment and chaperonin-like and disulfide isomerases and can lead to the production of soluble protein. Typically, a leader sequence is fused to the protein to be expressed which directs the protein to the periplasm. The leader is then removed by signal peptidases inside the periplasm. Examples of periplasmic-targeting leader sequences include the pelB leader from the pectate lyase gene and the leader derived from the alkaline phosphatase gene. In some cases, periplasmic expression allows leakage of the expressed protein into the culture medium. The secretion of proteins allows quick and simple purification from the culture supernatant. Proteins that are not secreted can be obtained from the periplasm by osmotic lysis. Similar to cytoplasmic expression, in some cases proteins can become insoluble and denaturants and reducing agents can be used to facilitate solubilization and refolding. Temperature of induction and growth also can influence expression levels and solubility, typically temperatures between 25° C. and 37° C. are used. Typically, bacteria produce aglycosylated proteins. Thus, if proteins require glycosylation for function, glycosylation can be added in vitro after purification from host cells.

[0472] b. Yeast

[0473] Yeasts such as Saccharomyces cerevisae, Schizosaccharomyces pombe, Yarrowia lipolytica, Kluyveromyces lactis and Pichia pastoris are well known yeast expression hosts that can be used for production of modified proteases. Yeast can be transformed with episomal replicating vectors or by stable chromosomal integration by homologous recombination. Typically, inducible promoters are used to regulate gene expression. Examples of such promoters include GAL1, GAL7 and GAL5 and metallothionein promoters, such as CUP1, AOX1 or other Pichia or other yeast promoter. Expression vectors often include a selectable marker such as LEU2, TRP1, HIS3 and URA3 for selection and maintenance of the transformed DNA. Proteins expressed in yeast are often soluble. Co-expression with chaperonins such as Bip and protein disulfide isomerase can improve expression levels and solubility. Additionally, proteins expressed in yeast can be directed for secretion using secretion signal peptide fusions such as the yeast mating type alpha-factor secretion signal from Saccharomyces cerevisae and fusions with yeast cell surface proteins such as the Aga2p mating adhesion receptor or the Arxula adeninivorans glucoamylase. A protease cleavage site such as for the Kex-2 protease, can be engineered to remove the fused sequences from the expressed polypeptides as they exit the secretion pathway. Yeast also is capable of glycosylation at Asn-X-Ser/Thr motifs.

[0474] c. Insect Cells

[0475] Insect cells, particularly using baculovirus expression, are useful for expressing polypeptides such as modified proteases. Insect cells express high levels of protein and are capable of most of the post-translational modifications used by higher eukaryotes. Baculovirus have a restrictive host range which improves the safety and reduces regulatory concerns of eukaryotic expression. Typical expression vectors use a promoter for high level expression such as the polyhedrin promoter of baculovirus. Commonly used baculovirus systems include the baculoviruses such as Autographa californica nuclear polyhedrosis virus (AcNPV), and the Bombyx mori nuclear polyhedrosis virus (BmNPV) and an insect cell line such as Sf9 derived from Spodoptera frugiperda, Pseudaletia unipuncta (A7S) and Danaus plexippus (DpN1). For high-level expression, the nucleotide sequence of the molecule to be expressed is fused immediately downstream of the polyhedrin initiation codon of the virus. Mammalian secretion signals are accurately processed in insect cells and can be used to secrete the expressed protein into the culture medium. In addition, the cell lines Pseudaletia unipuncta (A7S) and Danaus plexippus (DpN1) produce proteins with glycosylation patterns similar to mammalian cell systems.

[0476] An alternative expression system in insect cells is the use of stably transformed cells. Cell lines such as the Schnieder 2 (S2) and Kc cells (Drosophila melanogaster) and C7 cells (Aedes albopictus) can be used for expression. The Drosophila metallothionein promoter can be used to induce high levels of expression in the presence of heavy metal induction with cadmium or copper. Expression vectors are typically maintained by the use of selectable markers such as neomycin and hygromycin.

[0477] d. Mammalian Cells

[0478] Mammalian expression systems can be used to express modified proteases. Expression constructs can be transferred to mammalian cells by viral infection such as adenovirus or by direct DNA transfer such as liposomes, calcium phosphate, DEAE-dextran and by physical means such as electroporation and microinjection. Expression vectors for mammalian cells typically include an mRNA cap site, a TATA box, a translational initiation sequence (Kozak consensus sequence) and polyadenylation elements. Such vectors often include transcriptional promoter-enhancers for high-level expression, for example the SV40 promoter-enhancer, the human cytomegalovirus (CMV) promoter and the long terminal repeat of Rous sarcoma virus (RSV). These promoter-enhancers are active in many cell types. Tissue and cell-type promoters and enhancer regions also can be used for expression. Exemplary promoter/enhancer regions include, but are not limited to, those from genes such as elastase I, insulin, immunoglobulin, mouse mammary tumor virus, albumin, alpha fetoprotein, alpha-1 antitrypsin, beta globin, myelin basic protein, myosin light chain 2, and gonadotropic releasing hormone gene control. Selectable markers can be used to select for and maintain cells with the expression construct. Examples of selectable marker genes include, but are not limited to, hygromycin B phosphotransferase, adenosine deaminase, xanthine-guanine phosphoribosyl transferase, aminoglycoside phosphotransferase, dihydrofolate reductase and thymidine kinase. Fusion with cell surface signaling molecules such as TCR-ζ and Fc_{ε}RI-γ can direct expression of the proteins in an active state on the cell surface.

[0479] Many cell lines are available for mammalian expression including mouse, rat human, monkey, chicken and hamster cells. Exemplary cell lines include, but are not limited to, CHO, Balb/3T3, HeLa, MT2, mouse NS0 (nonsecreting) and other myeloma cell lines, hybridoma and heterohybridoma cell lines, lymphocytes, fibroblasts, Sp2/0, COS, NIH3T3, HEK293, 293S, 2B8, and HKB cells. Cell lines also are available adapted to serum-free media which facilitates purification of secreted proteins from the cell culture media. One such example is the serum free EBNA-1 cell line (Pham et al., (2003) Biotechnol. Bioeng. 84:332-42.)

[0480] e. Plants

[0481] Transgenic plant cells and plants can be to express modified proteases. Expression constructs are typically transferred to plants using direct DNA transfer such as microprojectile bombardment and PEG-mediated transfer into protoplasts, and with agrobacterium-mediated transformation. Expression vectors can include promoter and enhancer sequences, transcriptional termination elements and translational control elements. Expression vectors and transformation techniques are usually divided between dicot hosts, such as Arabidopsis and tobacco, and monocot hosts, such as corn and rice. Examples of plant promoters used for expression include the cauliflower mosaic virus promoter, the nopaline synthase promoter, the ribose bisphosphate carboxylase promoter and the ubiquitin and UBQ3 promoters. Selectable markers such as hygromycin, phosphomannose isomerase and neomycin phosphotransferase are often used to facilitate selection and maintenance of transformed cells. Transformed plant cells can be maintained in culture as cells, aggregates (callus tissue) or regenerated into whole plants. Transgenic plant cells also can include algae engineered to produce proteases or modified proteases (see for example, Mayfield et al. (2003) PNAS 100:438-442). Because plants have different glycosylation patterns than mammalian cells, this can influence the choice of proteases or modified proteases produced in these hosts.

[0482] 3. Purification Techniques

[0483] Methods for purification of protease polypeptides from host cells will depend on the chosen host cells and expression systems. For secreted molecules, proteins are generally purified from the culture media after removing the cells. For intracellular expression, cells can be lysed and the proteins purified from the extract. When transgenic organisms such as transgenic plants and animals are used for expression, tissues or organs can be used as starting material to make a lysed cell extract. Additionally, transgenic animal production can include the production of polypeptides in milk or eggs, which can be collected, and if necessary the proteins can be extracted and further purified using standard methods in the art.

[0484] The protease can be expressed and purified to be in an inactive form (zymogen form) or alternatively the expressed protease can be purified into an active form by autocatalysis to remove the proregion. Typically, the autoactivation occurs during the purification process, such as by incubating at room temperature for 24-72 hours. The rate and degree of activation is dependent on protein concentration and the specific modified protease, such that for example, a more dilute sample can need to be incubated at room temperature for a longer period of time. Activation can be monitored by SDS-PAGE (a 3 kilodalton shift) and by enzyme activity (cleavage of a fluorogenic substrate). Typically, a protease is allowed to achieve >75% activation before purification.

[0485] Proteases can be purified using standard protein purification techniques known in the art including, but not limited to, SDS-PAGE, size fraction and size exclusion chromatography, ammonium sulfate precipitation and ionic exchange chromatography, such as anion exchange. Affinity purification techniques also can be utilized to improve the efficiency and purity of the preparations. For example, antibodies, receptors and other molecules that bind proteases can be used in affinity purification. Expression constructs also can be engineered to add an affinity tag to a protein such as a myc epitope, GST fusion or His₆ and affinity purified with myc antibody, glutathione resin and Ni-resin, respectively. Purity can be assessed by any method known in the art including gel electrophoresis and staining and spectrophotometric techniques.

[0486] 4. Fusion Proteases

[0487] Fusion proteins containing a protease and one or more other polypeptides also are provided. Pharmaceutical compositions containing such fusion proteins formulated for administration by a suitable route are provided. Fusion proteins are formed by linking in any order the scaffold or modified protease and another polypeptide, such as an antibody or fragment thereof, growth factor, receptor, ligand and other such agent for the purposes of facilitating the purification of a protease, altering the pharmacodynamic properties of a protease by directing the protease to a targeted cell or tissue, and/or increasing the expression or secretion of a protease. Within a protease fusion protein, the protease polypeptide can correspond to all or a catalytically active portion thereof of a wildtype or scaffold protease protein. In some embodiments, the protease or catalytically active portion thereof is a modified protease. Fusion proteins provided herein retain substantially all of their specificity and/or selectivity for any one or more of the complement proteins. Generally, protease fusion polypeptides retain at least about 30%, 40%, 50%, 60%, 70%, 80%, 85%, 90% or 95% substrate specificity and/or selectivity compared with a non-fusion protease, including 96%, 97%, 98%, 99% or greater substrate specificity compared with a non-fusion protease.

[0488] Linkage of a protease polypeptide and another polypeptide can be effected directly or indirectly via a linker. In one example, linkage can be by chemical linkage, such as via heterobifunctional agents or thiol linkages or other such linkages. Fusion of a protease to another polypeptide can be to the N- or C-terminus of the protease polypeptide. Non-limiting examples of polypeptides that can be used in fusion proteins with a protease provided herein include, for example, a GST (glutathione S-transferase) polypeptide, Fc domain from immunoglobulin G, or a heterologous signal sequence. The fusion proteins can contain additional components, such as E. coli maltose binding protein (MBP) that aid in uptake of the protein by cells (see, International PCT application No. WO 01/32711).

[0489] A protease fusion protein can be produced by standard recombinant techniques. For example, DNA fragments coding for the different polypeptide sequences can be ligated together in-frame in accordance with conventional techniques, e.g., by employing blunt-ended or stagger-ended termini for ligation, restriction enzyme digestion to provide for appropriate termini, filling-in of cohesive ends as appropriate, alkaline phosphatase treatment to avoid undesirable joining, and enzymatic ligation. In another embodiment, the fusion gene can be synthesized by conventional techniques including automated DNA synthesizers. Alternatively, PCR amplification of gene fragments can be carried out using anchor primers that give rise to complementary overhangs between two consecutive gene fragments that can subsequently be annealed and reamplified to generate a chimeric gene sequence (see, e.g., Ausubel et al (eds.) CURRENT PROTOCOLS IN MOLECULAR BIOLOGY, John Wiley & Sons, 1992). Moreover, many expression vectors are commercially available that already encode a fusion moiety (e.g., a GST polypeptide). A protease-encoding nucleic acid can be cloned into such an expression vector such that the fusion moiety is linked in-frame to the protease protein.

[0490] 5. Nucleotide Sequences

[0491] Nucleic acid molecules encoding scaffold or modified proteases are provided herein. Nucleic acid molecules include allelic variants or splice variants of any encoded scaffold protease, or catalytically active portion thereof. In one embodiment, nucleic acid molecules provided herein have at least 50, 60, 65, 70, 75, 80, 85, 90, 91, 92, 93, 94, 95, or 99% sequence identity or hybridize under conditions of medium or high stringency along at least 70% of the full-length of any nucleic acid encoded scaffold protease, or catalytically active portion thereof. In another embodiment, a nucleic acid molecule can include those with degenerate codon sequences of any of the scaffold proteases or catalytically active portions thereof such as those provided herein. Exemplary nucleic acid molecules, encoding scaffold or modified proteases, or catalytically active portions thereof, have a sequence of nucleotides as set forth in any of SEQ ID NOS: 11, 13, 15, 17, 19, 21, 23, 25, 27, 29, 31, 33, 35, 37, 39, 451-523, and 534-543.

[0492] Nucleic acid molecules, or fusion proteins containing a catalytically active portion of a nucleic acid molecule, operably-linked to a promoter, such as an inducible promoter for expression in mammalian cells also are provided. Such promoters include, but are not limited to, CMV and SV40 promoters; adenovirus promoters, such as the E2 gene promoter, which is responsive to the HPV E7 oncoprotein; a PV promoter, such as the PBV p89 promoter that is responsive to the PV E2 protein; and other promoters that are activated by the HIV or PV or oncogenes.

[0493] Scaffold or modified proteases provided herein, also can be delivered to the cells in gene transfer vectors. The transfer vectors also can encode additional other therapeutic agent(s) for treatment of the disease or disorder, such as Rheumatoid Arthritis or cardiovascular disease, for which the protease is administered. Transfer vectors encoding a protease can be used systemically, by administering the nucleic acid to a subject. For example, the transfer vector can be a viral vector, such as an adenovirus vector. Vectors encoding a protease also can be incorporated into stem cells and such stem cells administered to a subject such as by transplanting or engrafting the stem cells at sites for therapy. For example, mesenchymal stem cells (MSCs) can be engineered to express a protease and such MSCs engrafted at a tumor site for therapy.

G. Methods of Using: Formulation/Packaging/Administration

[0494] Pharmaceutical compositions containing a protease or modified protease produced herein, including MT-SP1 (modified) polypeptides, modified protease fusion proteins or encoding nucleic acid molecules, can be formulated in any conventional manner by mixing a selected amount of the polypeptide with one or more physiologically acceptable carriers or excipients. Selection of the carrier or excipient is within the skill of the administering profession and can depend upon a number of parameters. These include, for example, the mode of administration (i.e., systemic, oral, nasal, pulmonary, local, topical or any other mode) and disorder treated. The pharmaceutical compositions provided herein can be formulated for single dosage (direct) administration or for dilution or other modification. The concentrations of the compounds in the formulations are effective for delivery of an amount, upon administration, that is effective for the intended treatment. Typically, the compositions are formulated for single dosage administration. To formulate a composition, the weight fraction of a compound or mixture thereof is dissolved, suspended, dispersed or otherwise mixed in a selected vehicle at an effective concentration such that the treated condition is relieved or ameliorated. Pharmaceutical carriers or vehicles suitable for administration of the compounds provided herein include any such carriers known to those skilled in the art to be suitable for the particular mode of administration.

[0495] 1. Administration of Modified Protease Polypeptides

[0496] The polypeptides can be formulated as the sole pharmaceutically active ingredient in the composition or can be combined with other active ingredients. The polypeptides can be targeted for delivery, such as by conjugation to a targeting agent, such as an antibody. Liposomal suspensions, including tissue-targeted liposomes, also can be suitable as pharmaceutically acceptable carriers. These can be prepared according to methods known to those skilled in the art. For example, liposome formulations can be prepared as described in U.S. Pat. No. 4,522,811. Liposomal delivery also can include slow release formulations, including pharmaceutical matrices such as collagen gels and liposomes modified with fibronectin (see, for example, Weiner et al. (1985) J Pharm Sci. 74(9): 922-5).

[0497] The active compound is included in the pharmaceutically acceptable carrier in an amount sufficient to exert a therapeutically useful effect in the absence of undesirable side effects on the subject treated. The therapeutically effective concentration can be determined empirically by testing the compounds in known in vitro and in vivo systems, such as the assays provided herein.

[0498] The polypeptides provided herein (i.e. active compounds) can be administered in vitro, ex vivo, or in vivo by contacting a mixture, such as a body fluid or other tissue sample, with a protease polypeptide provided herein, including any of the modified MT-SP1 proteases provided herein. For example, when administering a compound ex vivo, a body fluid or tissue sample from a subject can be contacted with the protease polypeptides that are coated on a tube or filter, such as for example, a ture or filter in a bypass machine. When administering in vivo, the active compounds can be administered by any appropriate route, for example, orally, nasally, pulmonary, parenterally, intravenously, intradermally, subcutaneously, or topically, in liquid, semi-liquid or solid form and are formulated in a manner suitable for each route of administration.

[0499] The modified protease and physiologically acceptable salts and solvates can be formulated for administration by inhalation (either through the mouth or the nose), oral, transdermal, pulmonary, parenteral or rectal administration. For administration by inhalation, the modified protease can be delivered in the form of an aerosol spray presentation from pressurized packs or a nebulizer with the use of a suitable propellant, e.g., dichlorodifluoromethane, trichlorofluoromethane, dichlorotetrafluoroethane, carbon dioxide or other suitable gas. In the case of a pressurized aerosol, the dosage unit can be determined by providing a valve to deliver a metered amount. Capsules and cartridges of e.g., gelatin for use in an inhaler or insufflator, can be formulated containing a powder mix of a therapeutic compound and a suitable powder base such as lactose or starch.

[0500] For pulmonary administration to the lungs, the modified protease can be delivered in the form of an aerosol spray presentation from a nebulizer, turbonebulizer, or microprocessor-controlled metered dose oral inhaler with the use of a suitable propellant. Generally, particle size of the aerosol is small, such as in the range of 0.5 to 5 microns. In the case of a pharmaceutical composition formulated for pulmonary administration, detergent surfactants are not typically used. Pulmonary drug delivery is a promising non-invasive method of systemic administration. The lungs represent an attractive route for drug delivery, mainly due to the high surface area for absorption, thin alveolar epithelium, extensive vascularization, lack of hepatic first-pass metabolism, and relatively low metabolic activity.

[0501] For oral administration, the pharmaceutical compositions can take the form of, for example, tablets, pills, liquid suspensions, or capsules prepared by conventional means with pharmaceutically acceptable excipients such as binding agents (e.g., pregelatinized maize starch, polyvinylpyrrolidone or hydroxypropyl methylcellulose); fillers (e.g., lactose, microcrystalline cellulose or calcium hydrogen phosphate); lubricants (e.g., magnesium stearate, talc or silica); disintegrants (e.g., potato starch or sodium starch glycolate); or wetting agents (e.g., sodium lauryl sulphate). The tablets can be coated by methods well known in the art. Liquid preparations for oral administration can take the form of, for example, solutions, syrups or suspensions, or they can be presented as a dry product for constitution with water or other suitable vehicle before use. Such liquid preparations can be prepared by conventional means with pharmaceutically acceptable additives such as suspending agents (e.g., sorbitol syrup, cellulose derivatives or hydrogenated edible fats); emulsifying agents (e.g., lecithin or acacia); non-aqueous vehicles (e.g., almond oil, oily esters, ethyl alcohol or fractionated vegetable oils); and preservatives (e.g., methyl or propyl-p-hydroxybenzoates or sorbic acid). The preparations also can contain buffer salts, flavoring, coloring and sweetening agents as appropriate.

[0502] Preparations for oral administration can be formulated for controlled release of the active compound. For buccal administration the compositions can take the form of tablets or lozenges formulated in conventional manner.

[0503] The modified protease polypeptides can be formulated as a depot preparation. Such long-acting formulations can be administered by implantation (for example, subcutaneously or intramuscularly) or by intramuscular injection. Thus, for example, the therapeutic compounds can be formulated with suitable polymeric or hydrophobic materials (for example as an emulsion in an acceptable oil) or ion exchange resins, or as sparingly soluble derivatives, for example, as a sparingly soluble salt.

[0504] The modified protease can be formulated for parenteral administration by injection (e.g., by bolus injection or continuous infusion). Formulations for injection can be presented in unit dosage form (e.g., in ampoules or in multi-dose containers) with an added preservative. The compositions can take such forms as suspensions, solutions or emulsions in oily or aqueous vehicles and can contain formulatory agents such as suspending, stabilizing and/or dispersing agents. Alternatively, the active ingredient can be in powder-lyophilized form for constitution with a suitable vehicle, e.g., sterile pyrogen-free water, before use.

[0505] The pharmaceutical compositions can be formulated for local or topical application, such as for topical application to the skin (transdermal) and mucous membranes, such as in the eye, in the form of gels, creams, and lotions and for application to the eye or for intracisternal or intraspinal application. Such solutions, particularly those intended for ophthalmic use, can be formulated as 0.01%-10% isotonic solutions and pH about 5-7 with appropriate salts. The compounds can be formulated as aerosols for topical application, such as by inhalation (see, for example, U.S. Pat. Nos. 4,044,126, 4,414,209 and 4,364,923, which describe aerosols for delivery of a steroid useful for treatment inflammatory diseases, particularly asthma).

[0506] The concentration of active compound in the drug composition depends on absorption, inactivation and excretion rates of the active compound, the dosage schedule, and amount administered as well as other factors known to those of skill in the art. As described further herein, dosages can be determined empirically using comparisons of properties and activities (e.g., cleavage of one or more complement proteins) of the modified protease compared to the unmodified and/or native protease.

[0507] The compositions, if desired, can be presented in a package, in a kit or dispenser device, that can contain one or more unit dosage forms containing the active ingredient. In some examples, the composition can be coated on a device, such as for example on a tube or filter in, for example, a bypass machine. The package, for example, contains metal or plastic foil, such as a blister pack. The pack or dispenser device can be accompanied by instructions for administration. The compositions containing the active agents can be packaged as articles of manufacture containing packaging material, an agent provided herein, and a label that indicates the disorder for which the agent is provided.

[0508] Also provided are compositions of nucleic acid molecules encoding the protease polypeptides and expression vectors encoding them that are suitable for gene therapy. Rather than deliver the protein, nucleic acid can be administered in vivo, such as systemically or by other route, or ex vivo, such as by removal of cells, including lymphocytes, introduction of the nucleic therein, and reintroduction into the host or a compatible recipient.

[0509] 2. Administration of Nucleic Acids Encoding Modified Protease Polypeptides (Gene Therapy)

[0510] Protease polypeptides can be delivered to cells and tissues by expression of nucleic acid molecules. Protease polypeptides can be administered as nucleic acid molecules encoding protease polypeptides, including ex vivo techniques and direct in vivo expression. Nucleic acids can be delivered to cells and tissues by any method known to those of skill in the art. The isolated nucleic acid can be incorporated into vectors for further manipulation. Exemplary nucleic acids are any that encode or that hybridize under medium to high stringency to a nucleic acid that encodes a scaffold or modified protease, or catalytically active portion thereof having a sequence of amino acids set forth in any of SEQ ID NOS: 12, 14, 16, 18, 20, 22, 24, 26, 28, 30, 32, 34, 36, 38, 40-69, 404-418, 419-447, 524-533, 552-659, or 663-710. Exemplary nucleic acid molecules, encoding scaffold or modified proteases, or catalytically active portions thereof, have a sequence of nucleotides as set forth in any of SEQ ID NOS: 11, 13, 15, 17, 19, 21, 23, 25, 27, 29, 31, 33, 35, 37, 39, 451-523, and 534-543.

[0511] Methods for administering protease polypeptides by expression of encoding nucleic acid molecules include administration of recombinant vectors. The vector can be designed to remain episomal, such as by inclusion of an origin of replication or can be designed to integrate into a chromosome in the cell. Protease polypeptides also can be used in ex vivo gene expression therapy using vectors. For example, cells can be engineered to express a protease polypeptide, such as by integrating a protease polypeptide encoding-nucleic acid into a genomic location, either operatively linked to regulatory sequences or such that it is placed operatively linked to regulatory sequences in a genomic location. Such cells then can be administered locally or systemically to a subject, such as a patient in need of treatment. Exemplary vectors for in vivo and ex vivo gene therapy include viral vectors, and non-viral vectors such as for example, liposomes or artificial chromosomes.

[0512] Viral vectors, including, for example adenoviruses, herpes viruses, retroviruses EBV, SV40, cytomegalovirus vector, vaccinia virus vector, and others designed for gene therapy can be employed. The vectors can remain episomal or can integrate into chromosomes of the treated subject. A protease polypeptide can be expressed by a virus, which is administered to a subject in need of treatment. Virus vectors suitable for gene therapy include adenovirus, adeno-associated virus, retroviruses, lentiviruses and others noted above. For example, adenovirus expression technology is well-known in the art and adenovirus production and administration methods also are well known. Adenovirus serotypes are available, for example, from the American Type Culture Collection (ATCC, Rockville, Md.). Adenovirus can be used ex vivo, for example, cells are isolated from a patient in need of treatment, and transduced with a protease polypeptide-expressing adenovirus vector. After a suitable culturing period, the transduced cells are administered to a subject, locally and/or systemically. Alternatively, protease polypeptide-expressing adenovirus particles are isolated and formulated in a pharmaceutically-acceptable carrier for delivery of a therapeutically effective amount to prevent, treat or ameliorate a disease or condition of a subject. In one embodiment, the disease to be treated is caused by complement activation. Typically, adenovirus particles are delivered at a dose ranging from 1 particle to 1014 particles per kilogram subject weight, generally between 106 or 108 particles to 1012 particles per kilogram subject weight.

[0513] The nucleic acid molecules can be introduced into artificial chromosomes and other non-viral vectors. Artificial chromosomes, such as ACES (see, Lindenbaum et al. Nucleic Acids Res. 2004 Dec. 7;32(21):e172) can be engineered to encode and express the protease or modified protease. Briefly, mammalian artificial chromosomes (MACs) provide a means to introduce large payloads of genetic information into the cell in an autonomously replicating, non-integrating format. Unique among MACs, the mammalian satellite DNA-based Artificial Chromosome Expression System (ACES) can be reproducibly generated de novo in cell lines of different species and readily purified from the host cells' chromosomes. Purified mammalian ACEs can then be re-introduced into a variety of recipient cell lines where they have been stably maintained for extended periods in the absence of selective pressure using an ACE System. Using this approach, specific loading of one or two gene targets has been achieved in LMTK(−) and CHO cells.

[0514] Another method for introducing nucleic acids encoding the modified protease polypeptides is a two-step gene replacement technique in yeast, starting with a complete adenovirus genome (Ad2; Ketner et al. (1994) Proc. Natl. Acad. Sci. USA 91: 6186-6190) cloned in a Yeast Artificial Chromosome (YAC) and a plasmid containing adenovirus sequences to target a specific region in the YAC clone, an expression cassette for the gene of interest and a positive and negative selectable marker. YACs are of particular interest because they permit incorporation of larger genes. This approach can be used for construction of adenovirus-based vectors bearing nucleic acids encoding any of the described modified protease polypeptides for gene transfer to mammalian cells or whole animals.

[0515] The nucleic acids can be encapsulated in a vehicle, such as a liposome, or introduced into a cells, such as a bacterial cell, particularly an attenuated bacterium or introduced into a viral vector. For example, when liposomes are employed, proteins that bind to a cell surface membrane protein associated with endocytosis can be used for targeting and/or to facilitate uptake, e.g., capsid proteins or fragments thereof tropic for a particular cell type, antibodies for proteins which undergo internalization in cycling, and proteins that target intracellular localization and enhance intracellular half-life.

[0516] In some situations it is desirable to provide a nucleic acid source with an agent that targets cells, such as an antibody specific for a cell surface membrane protein or a target cell, or a ligand for a receptor on a target cell. Polynucleotides and expression vectors provided herein can be made by any suitable method. Further provided are nucleic acid vectors containing nucleic acid molecules as described above. Further provided are nucleic acid vectors containing nucleic acid molecules as described above and cells containing these vectors.

[0517] For ex vivo and in vivo methods, nucleic acid molecules encoding the protease polypeptide are introduced into cells that are from a suitable donor or the subject to be treated. Cells into which a nucleic acid can be introduced for purposes of therapy include, for example, any desired, available cell type appropriate for the disease or condition to be treated including, but not limited to, epithelial cells, endothelial cells, keratinocytes, fibroblasts, muscle cells, hepatocytes; blood cells such as T lymphocytes, B lymphocytes, monocytes, macrophages, neutrophils, eosinophils, megakaryocytes, granulocytes; various stem or progenitor cells, in particular hematopoietic stem or progenitor cells, e.g., such as stem cells obtained from bone marrow, umbilical cord blood, peripheral blood, fetal liver, and other sources thereof.

[0518] For ex vivo treatment, cells from a donor compatible with the subject to be treated or cells from a subject to be treated are removed, the nucleic acid is introduced into these isolated cells and the modified cells are administered to the subject. Treatment includes direct administration, such as, for example, encapsulated within porous membranes, which are implanted into the patient (see, e.g., U.S. Pat. Nos. 4,892,538 and 5,283,187). Techniques suitable for the transfer of nucleic acid into mammalian cells in vitro include the use of liposomes and cationic lipids (e.g., DOTMA, DOPE and DC-Chol) electroporation, microinjection, cell fusion, DEAE-dextran, and calcium phosphate precipitation methods. Methods of DNA delivery can be used to express protease polypeptides in vivo. Such methods include liposome delivery of nucleic acids and naked DNA delivery, including local and systemic delivery such as using electroporation, ultrasound and calcium-phosphate delivery. Other techniques include microinjection, cell fusion, chromosome-mediated gene transfer, microcell-mediated gene transfer and spheroplast fusion.

[0519] In vivo expression of a protease polypeptide can be linked to expression of additional molecules. For example, expression of a protease polypeptide can be linked with expression of a cytotoxic product such as in an engineered virus or expressed in a cytotoxic virus. Such viruses can be targeted to a particular cell type that is a target for a therapeutic effect. The expressed protease polypeptide can be used to enhance the cytotoxicity of the virus.

[0520] In vivo expression of a protease polypeptide can include operatively linking a protease polypeptide encoding nucleic acid molecule to specific regulatory sequences such as a cell-specific or tissue-specific promoter. Protease polypeptides also can be expressed from vectors that specifically infect and/or replicate in target cell types and/or tissues. Inducible promoters can be use to selectively regulate protease polypeptide expression.

[0521] Nucleic acid molecules, as naked nucleic acids or in vectors, artificial chromosomes, liposomes and other vehicles can be administered to the subject by systemic administration, topical, local and other routes of administration. When systemic and in vivo, the nucleic acid molecule or vehicle containing the nucleic acid molecule can be targeted to a cell.

[0522] Administration also can be direct, such as by administration of a vector or cells that typically targets a cell or tissue. For example, tumor cells and proliferating can be targeted cells for in vivo expression of protease polypeptides. Cells used for in vivo expression of a protease polypeptide also include cells autologous to the patient. Such cells can be removed from a patient, nucleic acids for expression of a protease polypeptide introduced, and then administered to a patient such as by injection or engraftment.

H. Therapeutic Uses

[0523] Therapeutic proteases have many potential advantages over traditional therapeutic approaches. Chief among them is the ability to inactivate disease targets in a catalytic manner (i.e. a one to many stoichiometry). Additional differentiating advantages include (1) irreversible inactivation; (2) low dosing; (3) small molecular size; (4) the ability to target post-translational modifications; (5) the ability to neutralize high target concentrations; and (6) the ability to target away from the active site. As a therapeutic, a protease must still exhibit the following characteristics: (1) access to the molecular target (extracellular), and (2) possess sufficiently stringent specificity for a target critical to a disease state. The protease polypeptides provided herein can be used in the treatment of diseases.

[0524] The protease polypeptides and nucleic acid molecules provided herein can be used for treatment of any condition for which activation of the complement pathway is implicated, particularly inflammatory conditions including acute inflammatory conditions, such as septic shock, and chronic inflammatory conditions, such as Rheumatoid Arthritis (RA). Acute and inflammatory conditions can be manifested as an immune-mediated disease such as for example autoimmune disease or tissue injury caused by immune-complex-mediated inflammation. A complement-mediated inflammatory condition also can be manifested as a neurodegenerative or cardiovascular disease that have inflammatory components. This section provides exemplary uses of, and administration methods for, proteases. These described therapies are exemplary and do not limit the applications of proteases. Such methods include, but are not limited to, methods of treatment of physiological and medical conditions described and listed below. Such methods include, but are not limited to, methods of treatment of sepsis, Rheumatoid arthritis (RA), membranoproliferative glomerulonephritis (MPGN), lupus erythematosus, Multiple Sclerosis (MS), Myasthenia gravis (MG), asthma, inflammatory bowel disease, respiratory distress syndrome, immune complex (IC)-mediated acute inflammatory tissue injury, multi-organ failure, Alzheimer's Disease (AD), Ischemia-reperfusion injuries caused by events or treatments such as myocardial infarct (MI), stroke, cardiopulmonary bypass (CPB) or coronary artery bypass graft, angioplasty, or hemodialysis, or Guillan Barre syndrome.

[0525] Treatment of diseases and conditions with proteases can be effected by any suitable route of administration using suitable formulations as described herein including, but not limited to, subcutaneous injection, oral and transdermal administration. If necessary, a particular dosage and duration and treatment protocol can be empirically determined or extrapolated. For example, exemplary doses of recombinant and native protease polypeptides can be used as a starting point to determine appropriate dosages. Modified proteases that have more specificity and/or selectivity compared to a wildtype or scaffold protease can be effective at reduced dosage amounts and or frequencies. Dosage levels can be determined based on a variety of factors, such as body weight of the individual, general health, age, the activity of the specific compound employed, sex, diet, time of administration, rate of excretion, drug combination, the severity and course of the disease, and the patient's disposition to the disease and the judgment of the treating physician. The amount of active ingredient that can be combined with the carrier materials to produce a single dosage form with vary depending upon the host treated and the particular mode of administration.

[0526] Upon improvement of a patient's condition, a maintenance dose of a compound or compositions can be administered, if necessary; and the dosage, the dosage form, or frequency of administration, or a combination thereof can be modified. In some cases, a subject can require intermittent treatment on a long-term basis upon any recurrence of disease symptoms.

[0527] 1. Immune-Mediated Inflammatory Diseases

[0528] Proteases and modified proteases described herein, including but not limited to modified MT-SP1 proteases, can be used to treat inflammatory diseases. Inflammatory diseases that can be treated with proteases include acute and chronic inflammatory diseases. Exemplary inflammatory diseases include central nervous system diseases (CNS), autoimmune diseases, airway hyper-responsiveness conditions such as in asthma, rheumatoid arthritis, inflammatory bowel disease, and immune complex (IC)-mediated acute inflammatory tissue injury.

[0529] Experimental autoimmune encephalomyelitis (EAE) can serve as a model for multiple sclerosis (MS) (Piddlesden et al., (1994) J Immunol 152:5477). EAE can be induced in a number of genetically susceptible species by immunization with myelin and myelin components such as myelin basic protein, proteolipid protein and myelin oligodendrocyte glycoprotein (MOG). For example, MOG-induced EAE recapitulates essential features of human MS including the chronic, relapsing clinical disease course the pathohistological triad of inflammation, reactive gliosis, and the formation of large confluent demyelinated plaques. Proteases and modified proteases can be assessed in EAE animal models. Proteases are administered, such as by daily intraperitoneal injection, and the course and progression of symptoms is monitored compared to control animals. The levels of inflammatory complement components that can exacerbate the disease also can be measured by assaying serum complement activity in a hemolytic assay and by assaying for the deposition of complement components, such as for example C1, C3 and C9.

[0530] Complement activation modulates inflammation in diseases such as rheumatoid arthritis (RA) (Wang et al., (1995) PNAS 92:8955). Proteases and modified proteases, including modified MT-SP1 polypeptides, can be used to treat RA. For example, proteases can be injected locally or systemically. Proteases can be dosed daily or weekly. PEGylated proteases can be used to reduce immunogenicity. In one example, type II collagen-induced arthritis (CIA) can be induced in mice as a model of autoimmune inflammatory joint disease that is histologically similar to RA characterized by inflammatory synovitis, pannus formation, and erosion of cartilage and bone. To induce CIA, bovine type II collagen (B-CII) in the presence of complete Freund's adjuvant can be injected intradermally at the base of the tail. After 21 days, mice can be reimmunized using the identical protocol. To examine the effects of a protease or modified protease, including MT-SP1 polypeptides, 3 weeks following the initial challenge with B-CII, a protease or control can be administered intraperitoneally twice weekly for 3 weeks. Mice can be sacrificed 7 weeks following the initial immunization for histologic analysis. To assess the therapeutic affect of a protease on established disease, a protease can be administered daily for a total of 10 days following the onset of clinical arthritis in one or more limbs. The degree of swelling in the initially affected joints can be monitored by measuring paw thickness using calipers. In both models, serum can be drawn from mice for hemolytic assays and measurement of complement markers of activation such as for example C5a and C5b-9. In another example, primate models are available for RA treatments. Response of tender and swollen joints can be monitored in subjects treated with protease polypeptides and controls to assess protease treatment.

[0531] Proteases or modified proteases, including but not limited to MT-SP1 polypeptides, can be used to treat immune complex (IC)-mediated acute inflammatory tissue injury. IC-mediated injury is caused by a local inflammatory response against IC deposition in a tissue. The ensuing inflammatory response is characterized by edema, neutrophila, hemorrhage, and finally tissue necrosis. IC-mediated tissue injury can be studied in an in vivo Arthus (RPA) reaction. Briefly, in the RPA reaction, an excess of antibody (such as for example rabbit IgG anti-chicken egg albumin) is injected into the skin of animals, such as for example rats or guinea pigs, that have previously been infused intravenously with the corresponding antigen (i.e. chicken egg albumin) (Szalai et al., (2000) J Immunol 164:463). Immediately before the initiation on an RPA reaction, a protease, or a bolus control, can be administered at the same time as the corresponding antigen by an intravenous injection via the right femoral vein. Alternatively, a protease can be administered during the initial hour of the RPA reaction, beginning immediately after injection of the antigen and just before dermal injection of the antibody. The effects of a protease on the generation of complement-dependent IC-mediated tissue injury can be assessed at various times after initiation of RPA by collecting blood to determine the serum hemolytic activity, and by harvesting the infected area of the skin for quantitation of lesion size.

[0532] Therapeutic proteases, such as those described herein including MT-SP1 polypeptides, can be used to treat sepsis and severe sepsis that can result in lethal shock. A model of complement-mediated lethal shock can be used to test the effects of a protease as a therapeutic agent. In one such example, rats can be primed with a trace amount of lipopolysaccharide (LPS), followed by the administration of a monoclonal antibody against a membrane inhibitor of complement (anti-Crry) (Mizuno M et al., (2002) Int Arch Allergy Immunol 127:55). A protease or control can be administered at any time during the course of initiation of lethal shock such as before LPS priming, after LPS priming, or after anti-Crry administration and the rescue of rats from lethal shock can be assessed.

[0533] 2. Neurodegenerative Disease

[0534] Complement activation exacerbates the progression of Alzheimer's disease (AD) and contributes to neurite loss in AD brains. Proteases and modified proteases described herein, including but not limited to modified MT-SP1 polypeptides, can be used to treat AD. Mouse models that mimic some of the neuropathological and behavioral features of AD can be used to assess the therapeutic effects of proteases. Examples of transgenic mouse models include introducing the human amyloid precursor protein (APP) or the presenilin 1 (PS1) protein with disease-producing mutations into mice under the control of an aggressive promoter. These mice develop characteristics of AD including increases in beta-amyloid plaques and dystrophic neurites. Double transgenic mice for APP and PS1 mutant proteins develop larger numbers of fibrillar beta-amyloid plaques and show activated glia and complement factors associated with the plaque. Proteases can be administered, such as by daily intraperitoneal or intravenous injections, and the course and progression of symptoms is monitored compared to control animals.

[0535] 3. Cardiovascular Disease

[0536] Proteases and modified proteases described herein, including but not limited to modified MT-SP1 proteases, can be used to treat cardiovascular disease. Proteases can be used in the treatment of cardiovascular diseases including ischemia reperfusion injury resulting from stroke, myocardial infarction, cardiopulmonary bypass, coronary artery bypass graft, angioplasty, or hemodialysis. Proteases also can be used in the treatment of the inflammatory response associated with cardiopulmonary bypass that can contribute to tissue injury. Generally, a protease can be administered prior to, concomitantly with, or subsequent to a treatment or event that induces a complement-mediated ischemia reperfusion injury. In one example, a protease can be administered to a subject prior to the treatment of a subject by a complement-mediated, ischemic-injury inducing event, such as for example coronary artery bypass graft of angioplasty.

[0537] Effects of a protease on treatment of ischemia reperfusion injury can be assessed in animal models of the injury. In one such model, myocardial ischemia is induced in rabbits that have had an incision made in their anterior pericardium by placing a 3-0 silk suture around the left anterior descending (LAD) coronary artery 5-8 mm from its origin and tightening the ligature so that the vessel becomes completely occluded (Buerke et al., (2001) J Immunol 167:5375). A protease, such as for example a modified MT-SP1 polypeptide, or a control vehicle such as saline, can be given intravenously in increasing doses as a bolus 55 minutes after the coronary occlusion (i.e. 5 minutes before reperfusion). Five minutes later (i.e. after a total of 60 minutes of ischemia) the LAD ligature can be untied and the ischemic myocardium can be reperfused for 3 hours. At the end of the reperfusion period, the ligature around the LAD is tightened. Effects of a protease on ischemia injury can be analyzed by assessing effects on myocardial necrosis, plasma creatine kinase levels, and markers of neutrophil activation such as for example myeloperoxidase activity and superoxide radical release.

[0538] In another model of complement-mediated myocardial injury sustained upon perfusion of isolated mouse hearts with Krebs-Henseleit buffer containing 6% human plasma, treatment with proteases or modified proteases can be used to limit tissue damage to the heart. In such an example, the buffer used to perfuse the hearts can be supplemented with varying doses of proteases, such as but not limited to modified proteases including MT-SP1 polypeptides. The perfused hearts can be assayed for deposition of human C3 and C5b-9, coronary artery perfusion pressure, end-diastolic pressure, and heart rate.

[0539] Proteases and modified proteases, such as for example MT-SP1 polypeptides, can be used as therapeutics prior to or following Cardiopulmonary Bypass (CPB) or coronary artery bypass graft to inhibit the inflammatory immune response that often follows bypass and that can contribute to tissue injury. An in vitro recirculation of whole blood in an extracorporeal bypass circuit can be used to stimulate platelet and leukocyte changes and complement activation induced by CPB (Rinder et al. (1995) J. Clin. Invest. 96:1564). In such a model, addition of a protease or modified protease or control buffer, in varying doses, can be added to a transfer pack already containing blood from a healthy donor and porcine heparin, just prior to addition of the blood to the extracorporeal circuit. Blood samples can be drawn at 5, 15, 30, 45, 60, 75, and 90 minutes after recirculation and assayed for complement studies such as for example hemolytic assays and/or complement activation assays to measure for C5a, C3a, and/or sC5b-9. A pretreatment sample of blood drawn before its addition to the extracorporeal circuit can be used as a control. Flow cytometry of blood samples can be performed to determine levels of adhesion molecules on populations of circulating leukocytes (i.e. neutrophils) in the blood such as for example CD11b and P-selectin levels.

I. Combination Therapies

[0540] Wildtype and modified proteases can be used in combination with each other and with other existing drugs and therapeutic agents to treat diseases and conditions. For example, as described herein a number of proteases can be used to treat acute and chronic inflammatory conditions and diseases. Such treatments can be performed in conjunction with other anti-inflammatory drugs and/or therapeutic agents. Examples of anti-inflammatory drugs and agents useful for combination therapies include non steroidal anti-inflammatory drugs (NSAIDs) including salicylates, such as aspirin, traditional NSAIDs such as ibuprofen, naproxen, ketroprofen, nabumetone, piroxicam, diclofenac, or indomethacin, and Cox-2 selective inhibitors such as celecoxib (Celebrex®) or Rotecoxin (Vioxx®). Other compounds useful in combination therapies include antimetabolites such as methotrexate and leflunomide, corticosteroids or other steroids such as cortisone, dexamethasone, or prednisone, analgesics such as acetaminophen, aminosalicylates such as mesalamine, and cytotoxic agents such as azathioprine (Imuran®), cyclophosphamide (Cytoxan®), and cyclosporine A. Additional agents that can be used in combination therapies include biological response modifiers. Biological response modifiers can include pro-inflammatory cytokine inhibitors including inhibitors of TNF-alpha such as etanercept (Enbrel®), infliximab (Remicade®), or adalimumad (Humira®), and inhibitors of IL-1 such as anakinra (Kineret®). Biological response modifiers also can include anti-inflammatory cytokines such as IL-10, B cell targeting agents such as anti-CD20 antibodies (Rituxmab®), compounds targeting T antigens, adhesion molecule blockers, chemokines receptor antagonists, kinase inhibitors such as inhibitors to MAP Kinase, JNK, or NFκB, and PPAR-γ ligands.

[0541] Wildtype and modified proteases also can be used in combination with agents that are administered to treat cardiovascular disease and/or administered during procedures to treat cardiovascular disease such as for example those described herein that contribute to inflammatory conditions associated with complement-mediated ischemia-reperfusion injury. For example, proteases provided herein such as scaffold proteases or modified proteases can be administered in combination with anti-coagulants. Examples of exemplary anti-coagulants include, but are not limited to, heparin, warfarin, acenocoumarol, phenindione, EDTA, citrate, oxalate, and direct thrombin inhibitors such as argatroban, lepirudin, bivalirudin, ximelagatran.

[0542] Additional agents, such as other complement inhibitors, can be used as anti-inflammatory drugs in combination therapy with proteases and modified proteases as described herein. Examples of such other complement inhibitors include cobra venom factor (CVF), polyanionic molecules such as heparin, dextran sulphate, polyvinyl sulphate, polylysine, or suramin, natural molecules such as K-76COOH, Rosmarinic acid, or extract of the Chinese medicinal herb Ephedra, synthetic molecules such as afamastat mesilate (FUT-175), a synthetic inhibitor of C1s (C1s-INH-248), or an inhibitor against C1s and fD (BCX-1470), peptide inhibitors such as compstatin, antibody inhibitors of complement such as anti-C5 (N19-8), a humanized anti-C5 (h5G1.1), anti-C6, or anti-C8 antibodies, and soluble forms of membrane complement regulators such as soluble CR1 (sCR1), soluble DAF (sDAF), soluble MCP (sMCF), or soluble CD59 (sCD59) (Morgan et al., (2003) Mol Immunol. 40:159).

[0543] Pharmaceutical compositions containing a protease or modified protease described herein can be used to treat any one or more inflammatory diseases or conditions mediated by complement activation. Also provided are combinations of a protease or modified protease and another treatment or compound for treatment of an inflammatory disease or condition. The protease or modified protease and the anti-inflammatory agent can be packaged as separate compositions for administration together or sequentially or intermittently. Alternatively, they can provided as a single composition for administration or as two compositions for administration as a single composition. The combinations can be packaged as kits, optionally with additional reagents, instructions for use, vials and other containers, syringes and other items for use of the modified protease.

### J. EXAMPLES

[0544] The following examples are included for illustrative purposes only and are not intended to limit the scope of the embodiments provided herein.

### Example 1

### Cloning and Mutagenesis of MT-SP1

[0545] Wildtype MT-SP1 was cloned into the pQE32 bacterial expression vector (Qiagen, SEQ ID NO:345) C-terminal to the 6 histidine tag using the BamH1 and HindIII restriction sites. The construct included pro-region, activation sequence, and protease domain, and contains residues 598 to the C-terminus of the sequence published by Takeuchi et al. (1999) PNAS 96:11054 and SEQ ID NO:2 (i.e. corresponding to residues 598 to 855 of the sequence of amino acids set forth in SEQ ID NO:2). Mutants were generated by the Quikchange site directed mutagenesis (Stratagene). Briefly, a PCR sample reaction was set up containing the wildtype MT-SP1 as a template and oligonucleotide primers designed to contain the desired mutation (see Table 21). The PCR reaction was as follows in a 50 μl total reaction volume: 5 μl 10× Reaction Buffer, 1 μl MT-SP1 DNA template (100 ng/μl), 0.5 μl 50 μM forward Primer, 0.5 μl 50 μM reverse Primer, 1.0 μl dNTPs, 41.0 μl H₂O, and 1.0 μl Pfu Ultra (2.5 units/μl). A control reaction also was performed in the absence of forward or reverse Primers. The PCR reaction conditions were as follows: 95° C. for 30 sec, followed by 18 cycles at 95° C. for 30 s, 55° C. for 60 s, and 72° C. for 8 min, 24 s. The reaction was terminated with an elongation step at 72° C. for 10 min followed by incubation at 4° C. Each reaction product was digested with DpnI for 1-2 hours at 37° C. 1.0 ml of the products were transformed into XL-1 Blue Supercompetent cells and plated at 2.0 μl and 20.0 μl on selective agar containing 50 μg/ml carbenicillin.

TABLE 21

Mutagenesis Primers

SEQ
ID

| | | |
|---|---|---|
| Primer | Sequence | NO |

| | | |
|---|---|---|
| F97Dforward | 5′-CACCCCTTCTTCAATGACGACACCTTCGACT | 346 |
| | ATGACATCG-3′ | |
| F97Dreverse | 5′-CGATGTCATAGTCGAAGGTGTCGTCATTGAA | 347 |
| | GAAGGGGTG-3′ | |
| F97Eforward | 5′-CCACCCCTTCTTCAATGACGAGACCTTCGAC | 348 |
| | TATGACATCGC-3′ | |
| F97Ereverse | 5′-GCGATGTCATAGTCGAAGGTCTCGTCATTGA | 349 |
| | AGAAGGGGTGG-3′ | |
| F97Aforward | 5′-CACCCCTTCTTCAATGACGCCACCTTCGACT | 350 |
| | ATGACATC-3′ | |
| F97Areverse | 5′-GATGTCATAGTCGAAGGTGGCGTCATTGAAG | 351 |
| | AAGGGGTG-3′ | |
| F97Wforward | 5′-CACCCCTTCTTCAATGACTGGACCTTCGACT | 352 |
| | ATGACATC-3′ | |
| F97Wreverse | 5′-GATGTCATAGTCGAAGGTCCAGTCATTGAAG | 353 |
| | AAGGGGTG-3′ | |
| Y146Nforward | 5′-GGACACACCCAGAACGGAGGCACTGGC-3′ | 354 |
| Y146Nreverse | 5′-GCCAGTGCCTCCGTTCTGGGTGTGTCC-3′ | 355 |
| Y146Dforward | 5′-GGACACACCCAGGACGGAGGCACTGGC-3′ | 356 |
| Y146Dreverse | 5′-GCCAGTGCCTCCGTCCTGGGTGTGTCC-3′ | 357 |
| Y146Eforward | 5′-GGGACACACCCAGGAGGGAGGCACTGGCG- | 358 |
| | 3′ | |
| Y146Ereverse | 5′-CGCCAGTGCCTCCCTCCTGGGTGTGTCCC- | 359 |
| | 3′ | |
| Y146Aforward | 5′-GGGACACACCCAGGCCGGAGGCACTGGCG- | 360 |
| | 3′ | |
| Y146Areverse | 5′-CGCCAGTGCCTCCGGCCTGGGTGTGTCCC- | 361 |
| | 3′ | |
| Y146Wforward | 5′-GGGACACACCCAGTGGGGAGGCACTGGCG- | 362 |
| | 3′ | |
| Y146Wreverse | 5′-CGCCAGTGCCTCCCCACTGGGTGTGTCCC- | 363 |
| | 3′ | |
| Y146Rforward | 5′-GGGGACACACCCAGAGGGGAGGCACTGGCG | 364 |
| | C-3′ | |
| Y146Rreverse | 5′-GCGCCAGTGCCTCCCCTCTGGGTGTGTCCC | 365 |
| | C-3′ | |
| Q192Rforward | 5′-TGGACTCCTGCCGGGGTGATTCCGG-3′ | 366 |
| Q192Rreverse | 5′-CCGGAATCACCCCGGCAGGAGTCCA-3′ | 367 |
| K224Aforward | 5′-CGCTCAGAGGAACGCGCCAGGCGTGTACA- | 368 |
| | 3′ | |
| K224Areverse | 5′-TGTACACGCCTGGCGCGTTCCTCTGAGCG- | 369 |
| | 3′ | |
| K224Fforward | 5′-GCTGCGCTCAGAGGAACTTCCCAGGCGTGTA | 370 |
| | CACAAG-3′ | |
| K224Freverse | 5′-CTTGTGTACACGCCTGGGAAGTTCCTCTGAG | 371 |
| | CGCAGC-3′ | |

[0546] The sequences of each of the cloned protease domain MT-SP1 mutants designated by CB numbering is set forth in any of SEQ ID NOS: 10, 12, 14, 16, 18, 20, 22, 24, 26, 28, 30, 32, 34, 36, 38, 40, 552-605, or 672-680.

### Example 2

### Expression and Purification of MT-SP1

[0547] Wild-type and modified MT-SP1 were cloned into the pQE32 bacterial expression vector (Qiagen, SEQ ID NO:345) containing an N-terminal 6 histidine tag, prodomain, and protease domain as discussed in Example 1 above and the resulting constructs transformed into BL-21 E. coli cells. Cells were grown in 100 mL cultures to an OD of 0.6, and expression of the protease in inclusion bodies was induced by adding IPTG to a final concentration of 1 mM. After 4-6 hours, the bacteria were pelleted by centrifugation and the pellet resuspended in 50 mM Tris pH 8, 500 mM KCl, and 10% glycerol (buffer A). Cells were lysed by sonication and pelleted by centrifugation at 6000×g. Pellets were resuspended in 50 mM Tris pH 8, 6 M urea, 100 mM NaCl and 1% 2-mercaptoethanol (buffer B). Membrane and organelles were pelleted by centrifugation at 10,000×g and the supernatant was passed over a nickel NTA column (Qiagen). The column was washed with 50 mM Tris pH8, 6 M urea, 100 mM NaCl, 20 mM imidazole, 1% 2-mercaptoethanol and 0.01% Tween 20 (buffer D). The column was washed again with buffer D without Tween 20. The protease was then eluted from the column with 50 mM Tris pH 8, 6 M urea, 100 mM NaCl, 1% 2-mercaptoethanol and 250 mM imidazole (buffer E). The protease was then concentrated to a volume of ˜1 mL and then dialyzed at 4° C. overnight in 1 L of 50 mM Tris pH8, 3 M urea, 100 mM NaCl, 1% 2-mercaptoethanol, and 10% glycerol. Finally, the protease was dialyzed into 50 mM Tris pH 8, 100 mM NaCl, and 10% glycerol at 4° C. overnight. During the last dialysis step, the protease becomes autoactivated by self-cleavage at the juncture between the prodomain and the protease domain at the sequence RQAR/VVGG, resulting in the removal of the 6 histidine tag and prodomain.

### Example 3

### Expression and Purification of Modified MT-SP1 CB155 in Shake Flasks

[0548] CB155 and related recombinant human serine protease mutants as well as the wild-type MT-SP1 protease were cloned and expressed in E. coli as inclusion bodies as described in Examples 1 and 2 above. The production of the MT-SP1 or mutants was adapted for laboratory scale by pooling up to 30×1 L shake flasks for subsequent isolation of the inclusion body pellets for solubilization and refolding. Briefly, the MT-SP1 mutant CB155 plasmid construct was transformed into XL-1 Blue Supercompetent cells and a single fresh colony was picked and grown in 25 ml of luria broth (LB; Difco LB Broth Lennox, approximate formulation per liter: 10.0 g Tryptone, 10.0 g Yeast Extract, 5.0 g Sodium Chloride) containing 50 μg/ml carbenecillin at 37° C. overnight. Ten milliliters of the overnight culture was diluted into 1 L of LB in an Ultra Yield Flask (2.5L) and was shaken at 37° C. to an OD600 of about 0.6 to about 0.7 (i.e. shaken at 37° C. for about 2 hours). IPTG (Dioxane Free; Calbiochem) at 1.0 M was added to the culture at a final concentration of 1 mM to induce expression of the protease in inclusion bodies and the culture was shaken for an additional 4 hours at 37° C. The culture was harvested by centrifugation at 6000 rpm in a Sorvall rotor # SLC4000 for 20 minutes.

[0549] The cell pellet from the 1 L culture was resuspended in 50 ml of Wash Buffer II (300 mM Sodium Chloride, 50 mM Potassium Phosphate pH 7.4) and was transferred to a rosette cell for sonication. Cells were lysed by sonication as follows: 20-50 ml solution for 2 minutes, 30% duty cycle, output=5-6, on ice, repeated three times; 100+ ml solution for 2 minutes, 60% duty cycle, output=8, on ice, repeated six times. The sonicated lysate was centrifuged at 7000 rpm for 20 minutes at 4° C. Supernatant was discarded and the pellets were resuspended in 40 ml Wash Buffer I (300 mM Sodium Chloride, 50 mM Potassium Phosphate pH 7.4, 0.5% LDAO) per about 2.0 gram of inclusion bodies using a spatula and vortexing. The inclusion bodies were centrifuged at 9000 rpm for 15 minutes at 4° C., and washed a total of three times in Wash Buffer I. The centrifugation and washing steps were repeated two additional times in Wash Buffer II. The washed inclusion bodies were suspended in 20 ml of denaturing buffer (6 M Guanadine Hydrochloride, 100 mM Tris HCL pH 8.0, 20 mM Dithiothreitol) per about 2.0 grams of inclusion bodies using a spatula to break up the pellet and rocked at room temperature for 30 minutes until the pellet was dissolved or mostly dissolved. Any insoluble material was removed by centrifugation at 9000 rpm in a Sorvall SLA600TC rotor followed by resuspension in 20 ml buffer. The sample was slowly dripped into a beaker containing 100× volume of refolding buffer (100 mM Tris HCL pH 8.0, 150 mM NaCl, 5 mM reduced Glutathione, 0.05M oxidized glutathione, 1.5 M L-Arginine mono hydrochloride) and stirred slowly at 4° C. for 72 hours. The sample was diluted to 1 M final concentration of Arginine-HCL in 50 mM Tris pH 8.0/50 mM NaCl and then concentrated to about 700 ml using cross-flow filtration. The sample was then transferred to the VivaFlow (Sartorius, Edgewood N.Y.) and further concentrated to a final volume of about 300 ml. The sample was dialyzed into 50 mM Tris pH 8.0/50 mM NaCl (8 L) overnight. Some precipitation of the sample occurred. The sample was centrifuged at 9000 rpm to remove the precipitation.

[0550] The sample was incubated at room temperature until auto-activation of the protease occurred by cleavage of the proregion to release the mature enzyme. The autoactivation occurs during the purification process. Activity was monitored by SDS-PAGE (a 3 kilodalton shift). Activity also was monitored by enzyme activity as assessed by cleavage of a fluorogenic substrate. To measure enzyme activity, protease was diluted from 1:20 fold to 1:100 fold in assay buffer containing 50 mM Tris pH 8.0, 50 mM NaCl and 0.01% Tween-20. Five μl of the diluted protease was mixed with 50 μl of 100 μM Ac-RQAR-AMC substrate, and the fluorescence was measured in a fluorescence spectrophotometer (Moleculare Devices Gemini XPS) at an excitation wavelength of 380 nm, an emission wavelength of 450 nm and using a cut-off filter set at 435 nm. Activity was assessed over time as the sample was allowed to incubate at room temperature for about 24 to 72 hours until the activity stabilized. For more dilute samples, more time may be needed. Typically, the protease was allowed to achieve >75% activation before purification by anion exchange.

[0551] Once activity stabilized, the sample was dialyzed into 50 mM Hepes pH 6.5 (8 L) overnight. The sample was filtered and loaded onto a SourceQ column. After loading onto the SourceQ column, the sample was washed with 3 column volumes of buffer A (50 mM Hepes pH 6.5) and eluted with a gradient from 0-20% buffer B (50 mM Hepes pH 6.5/1 M NaCl) over 10 column volumes. The activity of each fraction was measured, and active fractions were combined and dialyzed into PBS overnight. The protein sample was concentrated to about 5 ml and benzamidine was added to a final concentration of 20 mM to inhibit the autolysis of CB155. The overall yield of CB155 is typically about 15 to 20 mg CB155/1 L cell culture. A yield of 22 mg/liter cell culture has been achieved by production of CB155 at the shake flask scale. The overall yield from inclusion body to native protein was typically less than 10%. Titers in the fermentation up to 3 g/L have been achieved in shake flasks.

[0552] The purified protein was assayed for specific activity, purity, and endotoxin levels. The specific activity or amount of active protease in each prep was determined by active site titration by incubation with an inhibitor that binds in the active site of the functional protease at varying concentrations followed by addition to a fluorogenic substrate for measurement of substrate proteolysis. The amount of active enzyme was calculated from a plot of the residual protease activity against the inhibitor concentration where the intercept corresponds to the concentration of active protease. Briefly, the purified protein was titrated with ecotin M84R using the method of Harris et al. (JBC, 1988, 273:27354-73) by titrating a stock of trypsin with 4-methylumbelliferyl p-guandinobenzoate (MUGB), then a stock of M84R ecotin was titrated with the trypsin. Finally, the purified protease was titrated with the M84R ecotin stock. In each case, the protease was incubated for 30 minutes at 30° C. with concentrations of the inhibitor between 0.1 and 2 times the expected protease concentration. Residual activities between 30% and 90% of the uninhibited protease activity were used to plot the data. Enzyme activity was monitored at 30° C. in the presence of 40 μM Ac-RQAR-AMC in assay buffer containing 50 mM Tris pH 8.0, 50 mM NaCl, and 0.01% Tween-20 (for trypsin activity, 10 mM CaCl2 was added) on a Gemini XPS spectrafluorimeter (Excitation: 380 nm; Emission: 450 nm; Cut-off: 435 mn). Purity of the protein preparation was assessed by resolution of the protein product on SDS-PAGE followed by staining with Coomassie Blue. The mature protease runs as a single band at 25 kD. The level of endotoxin in each prep was determined by Liumlus Amebocyte Lysate Chromo-LAL assay (Associated of Cape Cod) according to the manufacturer's protocol with the following modifications. The protease was diluted 100 fold into LAL Reagent Water (LRW), and split into two tubes. A challenge of 100 endotoxin unit (EU)/mL was added to one tube and LRW to the other. Then, the sample was diluted 2 fold into stock solutions such that the reaction contained a final concentration of 5 mM tosyl-lysyl-chloromethylketone (TLCK) and 10 mM Tris pH 8.0. Each sample was incubated 2 hours at 37° C. to inactivate the protease activity. Samples were further diluted 50 fold and assayed according to the manufacturer's instructions. Results were considered valid if the recovery of the endotoxin challenge was between 50 and 150% of theory. The final purified CB155 typically had >95% purity by SDS-PAGE, >90% specific activity, and contained approximately 50 to 500 EU/ml of endotoxin.

### Example 4

### Large Scale Fermentation of MT-SP1 and Mutants

[0553] Large scale fermentation of MT-SP1 mutants based on the protocol described in Example 3 has been performed. A 2 liter culture of a selected E. coli colony transformed with mutant MT-SP1 was grown overnight in LB media (Difco). The overnight culture was seeded into 50 L fermentation and grown for about 5 hours with shaking at 37° C. until absorbance at OD600 reached log phase. Expression of the protease in inclusion bodies was induced with the addition of IPTG to a final concentration of 700 μM and fermentation was continued for an additional 4 hours in fed-batch mode. The culture was harvested by centrifugation to yield a wet weight cell pellet of about 750 grams to 1680 grams. The cell pellet was resuspended and sonicated in 50 mM Tris, pH 8.0, 0.5 M KCl, 10% glycerol, 1 mM beta-mercaptoethanol at 10 ml buffer per 1 gram cell pellet. The sonication conditions were pulse on: 4 s, pulse off: 6 s, 700 W, 30 minutes. The sonicated lysate was centrifuged at 7000 rpm for 30 minutes at 4° C. Supernatant was discarded and the pellets were resuspended in Wash Buffer I (50 mM Tris pH 8.0, 0.5 M KCl, 10% glycerol, 1 mM beta-mercaptoethanol, 0.01% Tween 20) at 10 ml buffer per 1 g of inclusion bodies using a spatula and vortexing. The inclusion bodies were centrifuged and washed two times. The inclusion body yield was about 176 to 506 grams.

### Example 5

### Production of MT-SP1 in Pichia pastoris

[0554] The production of multi-milligram amounts of the protease domain of MT-SP1 was carried out by fermentation in a BioFlo 3000 fermentor (New Brunswick Scientific, NJ) equipped with a 3.3 L capacity bioreactor using a SMD1168/pPIC9K:MTSP1 Sac SCI clone (Friedrich et al. (2002) J. Biol. Chem., 277:2160-2168). ZA001 complex media (10 g/L yeast extract, 20 g/L peptone, 40 g/L glycerol, 5 g/L ammonium sulfate, 0.2 g/L calcium sulfate dehydrate, 2 g/L Magnesium sulfate hepahydrate, 2 g/L potassium sulfate, 25 g/L sodium hexametaposhpate, 4.35 ml/L PTM1) was inoculated with 100 ml of an overnight culture of the P. pastoris transformant. The culture was supplemented with 50% glycerol by fed-batch phase and induced for 18-24 hours with methanol controlled at 0.025%.

[0555] To purify recombinant MT-SP1 secreted into the culture media, cell and cell debris was removed by centrifugation at 5000 g for 30 minutes. The resulting supernatant was decanted, adjusted to pH 8.0 with 10 N NaOH, and filtered through a SartoBran 300 0.45+0.2 μM capsule (Sartorius). The supernatant was concentrated to 1 L by ultrafiltration using a 10 kDa ultrafiltration cartridge (NC SRT UF system with AG/Technologies UFP-10-C-5A filter), and the buffer was exchanged by cross-flow filtration into buffer A (50 mM tris-HCl, 50 mM NaCl, 0.05% tween-80, pH 8.0). The filtration unit was rinsed once with 1 L buffer A, which was combined with the concentrate.

[0556] The concentrated MT-SP1-containing solution was applied onto a 150 ml benzamidine column, that had been equilibrated with buffer A, at a flow rate of 8 ml/min. The column was washed with 3 column volumes of buffer B (50 mM tris-HCl, 1.0 M NaCl, 0.05% tween-80, pH 8.0) and eluted with 3 column volumes of buffer C (50 mM tris-HCl, 1.0M L-arginine, 0.05% tween-80, pH 8.0). Fractions containing MT-SP1 activity were pooled and concentrated to 10 ml using a JumboSep concentrator (Pall Gelman) and a 10 kDa cutoff membrane. Once concentrated to 10 ml, the buffer was exchanged into buffer D (50 mM Na₂HPO₄, 125 mM NaCl, pH 5.5), and the volume was adjusted to 5-10 ml. The retentate was removed and the concentrator washed with buffer D, which was added to the concentrate. The total sample volume was adjusted to 15 ml.

[0557] The partially purified MT-SP1 from the benazmidine column was passed through a 5 ml Q-sepharose Fast Flow HiTrap Column (Amersham-Pharmacia Biotech) pre-equilibrated with 15 ml of buffer D. The flow through was collected, and the protein concentration was determined by measurement of OD280 (using an extinction coefficient of 2.012 mg/OD280). Purified MT-SP1 was then deglycosylated by the addition of 0.1 μl of Endoglycosidase H (ProZyme, 5 U/ml) per mg of protein and incubation overnight at 4° C. with gentle swirling followed by a subsequent anion exchange purification step (not required for CB155 MT-SP1 mutant).

[0558] The conductivity of the deglycosylated pool was adjusted to 2.0-3.0 mS/cm with Nanopure H₂O and the pH was adjusted to 6.5 (about 200 to 300 ml final volume). MT-SP1 was then further purified by anion exchange chromatography by loading directly onto a Pharmacia Akta Explorer system using a 7 ml Source 15Q anion exchange column (Amersham-Pharmacia Biotech). The protein was eluted in a buffer containing 50 mM HEPES, pH 6.5 with a 0-0.33M NaCl gradient over 10 column volumes at a flow rate of 6 ml/min. Fractions containing protein were pooled, and benzamidine was added to a final concentration determined by measurement of OD280 and use of a theoretical extinction coefficient of 2.012 mg/OD280.

### Example 6

### Assessment of Plasma Activity

[0559] The activity in plasma of wildtype or modified proteases was determined by cleavage of the peptide substrate Ac-RQAR-AMC, which includes the MT-SP1 auto-activation site. One microliter of a 10 μM protease stock was diluted into 9 μl PBST or 9 μl pooled human citrated plasma (Innovative Research; Sarasota, Fla.) (1 μM final). The reaction was incubated for 5 minutes at 37° C. At the end of the incubation, 1 μl of the incubated protease mixture was diluted into 250 μl assay buffer (50 mM Tris, pH 8.0, 50 mM NaCl, 0.01% Tween-20). 1 μl of the Ac-RQAR-AMC substrate (6.25 mM in DMSO) was added to each well of a Nunc black microtiter plate and 50 μl of the diluted, incubated protease mixture was added to the well. Cleavage of the substrate was monitored using a Spectromax fluorescence plate reader by taking kinetic measurements with the excitation wavelength at 380 nm and the emission wavelength at 450 nm. Fractional activity of the protease was calculated as a ratio of the activity of the protease in plasma divided by the activity in PBST.

[0560] The plasma activity of wildtype MT-SP1 or a panel of MT-SP1 mutants was determined in parallel with assessment of the proteases in hemolytic assays (see Example 7 below). The results are set forth in Table 23 below.

### Example 7

### Hemolytic Assays for Screening and Titrating Protease Activity by Detection of Complement-Induced Hemolysis of Red Blood Cells

[0561] The functional activity of the complement system can be assessed using traditional hemolytic assays, which screen for function of the total complement pathway by determining the ability of the sample to lyse erythrocytes. Serial dilutions of the sample to be analyzed are incubated with antibody-sensitized sheep erythrocytes at a defined temperature. The number of red cells lysed is determined by spectrophotometric absorbance of released hemoglobin, which has a linear relationship to complement protein levels in the 50% lysis range. The results are usually expressed as reciprocal dilutions of the sample required to produce 50% lysis. Thus, when evaluating the activity of the components of the classical pathway, a CH₅₀ value can be determined. Tests evaluating the functional activity of the alternative pathway to determine the AH₅₀ (the titer at which 50% hemolysis occurs) use guinea pig, rabbit or chicken erythrocytes as target cells. Activation of the classical pathway is blocked by the addition of EGTA and Mg to the alternative pathway hemolytic assay.

[0562] Hemolytic assays can be modified to determine the effect of a given protease on complement activation. Protease is incubated with the plasma prior to co-incubation with the erythrocytes. Cleavage of complement products by the proteases will result in decreased complement activity. By incubating the plasma with serial dilutions of the proteases, an IC₅₀ can be determined, which is the concentration of protease at which 50% inhibition of complement activity is achieved.

[0563] A. Classical Hemolytic Assays

[0564] 1. Classical Hemolytic Assay: Preincubation with 20% Plasma

[0565] a. To assess complement activation following treatment with proteases, human plasma with sodium citrate as an anticoagulant (Innovative Research, Inc.) was diluted into PBST to a final concentration of 20% (10 μl plasma in 40 μl PBST) before addition of wildtype MT-SP1, CB155, or CB42 diluted to a final concentration of 0-1 μM. The reaction was incubated at 37° C. for 1 hour. The plasma solution was further diluted to a final concentration of 0.5% in a solution of sheep's red blood cells activated with IgG (6.25 μl plasma solution in 250 μl sheep's red blood cell solution, Diamedix (Miami, Fla.)). The solution was incubated with shaking at room temperature for 45 minutes. The cells were spun down at 2000 rpm for 2 minutes and 100 μl of the supernatant was removed and placed in a clear 96-well microtiter plate. Release of hemoglobin from the lysed red blood cells was monitored by reading the optical density (OD) at 415 nm. The IC₅₀ (nM) of hemolysis by wildtype MT-SP1, CB155, and CB42 was 131 nM, 94 nM, and 67 nM, respectively.

[0566] A panel of MT-SP1 modified proteases were tested for inhibition of hemolysis. Diluted human plasma containing sodium citrate as an anticoagulant was incubated with 200 nM of wildtype MT-SP1, CB12, CB13, CB31, CB32, CB40, CB41, CB42, CB43, CB44, CB45, CB64, CB66, CB67, and CB155. The reaction was incubated at 37° C. for 1 hour. The plasma solution was further diluted to a final concentration of 0.5% in a solution of sheep's red blood cells activated with IgG and hemolysis was assayed as described above. The CH50 value was determined. The fraction of hemolysis was determined by comparing the CH50 value of the wildtype or modified proteases compared to a sample containing no added protease (positive control) where the fraction of hemolysis of the positive control was set at 1.00. Table 22 depicts the raw fraction of hemolysis values. The data shows that all proteases tested inhibited hemolysis by at least 50% compared to the positive control with hemolysis completely inhibited in the presence of CB42.

TABLE 22
Inhibition of Hemolysis by a Panel of MT-SP1 Variants

| | Fraction of |
|---|---|
| Protease | Hemolysis |
| Wildtype | 0.14 |
| CB12 | 0.22 |
| CB13 | 0.50 |
| CB31 | 0.51 |
| CB32 | 0.38 |
| CB40 | 0.48 |
| CB41 | 0.32 |
| CB42 | 0.00 |
| CB43 | 0.23 |
| CB44 | 0.48 |
| CB45 | 0.27 |
| CB64 | 0.34 |
| CB66 | 0.44 |
| CB67 | 0.33 |
| CB155 | 0.09 |
| Negative control | 0.00 |
| Positive control | 1.00 |

[0567] b. In another experiment, to assess classical complement activation following treatment with proteases, proteases were initially diluted in PBST to a concentration of 5.0 μM for screening protocols, while serial dilutions of the proteases from 50 μM to 0.390 μM were used for protocols to determine the IC₅₀. MT-SP1 or modified proteases were preincubated with a final concentration of 20% plasma in an 0.2 ml tube by combining 2 μl of the diluted protease solution, 10 μl of human plasma (with sodium citrate as an anticoagulant; Innovative Research, Inc.) and 38 μl of PBST. This resulted in a further dilution of the protease to give a final concentration of 200 nM protease for the screening protocol, and 2.0 μM to 0.0156 μM protease for the IC₅₀ protocol. A no-protease control (10 μl plasma and 40 μl PBST) and a background control (50 μl PBST only) also were included in the assays. The reaction was incubated at 37° C. for 1 hour. Sensitized sheep erythrocytes (Diamdex, Miami, Fla.) were added to polypropylene 96-well plates at a volume of 120 μl per well, and 3 μl of the plasma/protease solution was mixed into each well giving a final plasma concentration of 0.5%. The solution was incubated with shaking at room temperature for 45 minutes. The cells were spun down at 2000 rpm for 5 minutes in a Sorvall table top centrifuge to pellet the unbroken cells, and 100 μl of the supernatant was removed and placed in a clear 96-well microtiter plate. Release of hemoglobin from the lysed red blood cells was monitored by reading the optical density (OD) at 415 nm. The fraction hemolysis was calculated by subtracting the background control from all of the wells, then dividing the experimental samples by the no-protease control (positive control), where the fraction of hemolysis of the positive control was set at 1.00. The IC₅₀ (nM) of hemolysis by the proteases were measured by plotting the fraction hemolysis versus protease concentration on a 4 parameter logistic curve fit (SoftMax Pro software, Molecular Devices, Calif.).

[0568] A panel of MT-SP1 modified proteases were tested for inhibition of hemolysis through cleavage of one or more components of the classical complement pathway. Diluted human plasma containing sodium citrate as an anticoagulant was incubated with either 200 nM, or serial dilutions from 2.0 μM to 0.0156 μM, of wildtype MT-SP1 (CB200), CB12, CB16, CB17, CB20, CB21, CB42, CB43, CB44, CB45, CB66, CB80, CB82, CB155, CB212, CB213, CB214, CB216, CB218, CB219, CB232, CB235, CB238, CB244, CB245, CB251, CB252, CB255, CB257, CB268, CB274, CB331, CB332, CB349, CB350, CB351, CB353, CB357, CB367, CB373, CB377, CB381, CB383, CB385, CB387, CB388, CB403, CB409, CB412, CB413, CB421, CB422, CB423, CB450, CB451, CB458, CB464, CB486, CB487, CB488, CB489 and CB490. The reaction was incubated at 37° C. for 1 hour. The protease/plasma solution was further diluted in sensitized sheep erythrocytes and hemolysis was assayed as described above. The fraction hemolysis and ID₅₀ was determined. Table 23 depicts the fraction hemolysis at 200 nM (Classical 200 nM hemolysis) and the IC₅₀ for each protease (20% plasma pre-incubation).

[0569] 2. Classical Hemolytic Assay: Preincubation with 90% Plasma

[0570] The modified classical hemolytic assay can be adapted further to measure the inhibitory activity of proteases under more physiological conditions by adjusting the plasma and protease concentrations. Proteases were initially diluted in PBST to a concentration of 50 μM for screening protocols, while serial dilutions of the proteases from 200 μM to 1.56 μM were used for protocols to determine the IC₅₀. MT-SP1 or modified proteases were preincubated with a final concentration of 90% plasma in an 0.2 ml tube by combining 2 μl of the diluted protease solution, 18 μl of human plasma (with sodium citrate as an anticoagulant; Innovative Research, Inc.). This resulted in a further dilution of the protease to give a final concentration of 5.0 μM protease for the screening protocol, and 20 μM to 0.156 μM protease for the IC₅₀ protocol. A no-protease control (18 μl plasma and 2 μl PBST) and a background control (20 μl PBST only) also were included in the assays. The reaction was incubated at 37° C. for 1 hour. The reaction mixtures were further diluted to 20% plasma with the addition of 70 μl PBST. Sensitized sheep erythrocytes (Diamdex, Miami, Fla.) were concentrated to 10× by pelleting a 3.0 ml aliquot, removing 2.7 ml of buffer and resuspending the cell pellet in the remaining 0.3 ml buffer. The concentrated sensitized erythrocytes were added to polypropylene 96-well plates at a volume of 12 μl per well. Preincubated protease/plasma mixtures at 6 μl or 60 μl were added to the erythrocytes to give a final concentration of 1% plasma or 10% plasma, respectively, in a final volume of 120 μl (PBST added to final volume). The solution was incubated with shaking at room temperature for 45 minutes. The cells were spun down at 2000 rpm for 5 minutes to pellet the unbroken cells, and 100 μl of the supernatant was removed and placed in a clear 96-well microtiter plate. Release of hemoglobin from the lysed red blood cells was monitored by reading the optical density (OD) at 415 nm. The fraction hemolysis was calculated by subtracting the background control from all of the wells, then dividing the experimental samples by the no-protease control (positive control), where the fraction of hemolysis of the positive control was set at 1.00. The IC₅₀ (nM) of hemolysis by the proteases were measured by plotting the fraction hemolysis vs protease concentration on a 4 parameter logistic curve fit (SoftMax Pro software, Molecular Devices, Calif.).

[0571] Wildtype MT-SP1 (CB200), and MT-SP1 mutants CB252 and CB377 were tested for inhibition of hemolysis following preincubation with 90% plasma. Preincubated protease/plasma mixtures (at a final concentration of 20 nM to 2000 nM protease) were incubated with sensitized erythrocytes at a final plasma concentration of 10% and hemolysis was assessed as described above. The IC₅₀ of hemolysis was determined as described above. The IC₅₀ of CB200, CB252 and CB377 was 967 nM, 379 nM, and 205 nM, respectively.

[0572] Modified MT-SP1 CB450 also was assessed for in vitro classicial pathway-induced hemolysis following preincubation with 90% plasma. Preincubated protease/plasma mixtures (at a final concentration of 20 nM to 2000 nM protease) were incubated with sensitized erythrocytes at a final plasma concentration of 1% and 10% and hemolysis was assessed as described above. The results show that CB450 dose-dependently decreased hemolysis induced by 1% or 10% plasma, with slightly greater inhibition of hemolysis observed upon induction by 1% plasma. For example, there was no detectable hemolysis observed upon induction in 1% plasma in the presence of 100 nM or greater CB450, whereas induction in 10% plasma required a higher yield of protease to achieve complete inhibition of hemolysis (i.e. about 750 nM or greater CB450 protease).

[0573] B. Alternative Hemolytic Assay

[0574] 1. Alternative Hemolytic Assay: Preincubation with 20% Plasma

[0575] To assess alternative complement activation following treatment with proteases, proteases were initially diluted in GVB/Mg/EGTA buffer containing gelatin veronal buffer (GVB; Comptech) with 1 mM MgCl₂ and 8 mM EGTA. The proteases were diluted to a concentration of 7.5 μM for screening protocols, while serial dilutions of the proteases from 30 μM to 0.2344 μM were used for protocols to determine the IC₅₀. MT-SP1 or modified proteases were preincubated with a final concentration of 20% plasma in a well of a 96-well polypropylene plate by combining 5 μl of the diluted protease solution, 15 μl of human plasma (with sodium citrate as an anticoagulant; Innovative Research, Inc.) and 55 μl of GVB/Mg/EGTA buffer. This resulted in a further dilution of the protease to give a final concentration of 500 nM protease for the screening protocol, and 2.0 μM to 0.0156 μM protease for the IC₅₀ protocol. A no-protease control (15 μl plasma and 60 μl GVB/Mg/EGTA) and a background control (75 μl GVB/Mg/EGTA only) also were included in the assays. The reaction was incubated at room temperature for 1 hour. Following the incubation, 5 μl GVB/Mg/EGTA was added to the incubated mixture, followed by 20 μl of washed chicken Alsevyrs (50% mix of whole blood from chickens and alsevers solution, which contains anti-coagulants; Colorado Serum Company, CO) giving a final plasma concentration of 15%. Prior to the addition, the Chicken Alsevyr were sensitized as described in Example 19 below and the cells were centrifuged and washed 3 times in cold PBS and resuspended in 10 ml GVB/Mg/EGTA, and stored on ice until use. The plates were shaken at 37° C. for 1 hour. The cells were spun down at 2000 rpm for 5 minutes to pellet the unbroken cells, and 100 μl of the supernatant was removed and placed in a clear 96-well microtiter plate. Release of hemoglobin from the lysed red blood cells was monitored by reading the optical density (OD) at 415 nm. The fraction hemolysis was calculated by subtracting the background control from all of the wells, then dividing the experimental samples by the no-protease control (positive control), where the fraction of hemolysis of the positive control was set at 1.00. The IC₅₀ (nM) of hemolysis by the proteases were measured by plotting the fraction hemolysis vs protease concentration on a 4 parameter logistic curve fit (SoftMax Pro software, Molecular Devices, CA).

[0576] A panel of MT-SP1 modified proteases were tested for inhibition of hemolysis through cleavage of one or more components of the alternative complement pathway. Human plasma containing sodium citrate as an anticoagulant was incubated with either 500 nM, or serial dilutions from 2.0 μM to 0.0156 μM, of wildtype MT-SP1 (CB200), CB12, CB16, CB17, CB20, CB21, CB42, CB43, CB44, CB45, CB66, CB80, CB82, CB155, CB212, CB213, CB214, CB216, CB218, CB219, CB232, CB235, CB238, CB244, CB245, CB251, CB252, CB255, CB257, CB268, CB274, CB331, CB332, CB349, CB350, CB351, CB353, CB0357, CB367, CB373, CB377, CB381, CB383, CB385, CB387, CB388, CB403, CB409, CB412, CB413, CB421, CB422, CB423, CB450, CB451, CB458, CB464, CB486, CB487, CB488, CB489 and CB490. The reaction was incubated at room temperature for 1 hour. The protease/plasma solution was further diluted in chicken erythrocytes and hemolysis was assayed as described above. The fraction hemolysis and ID₅₀ was determined. Table 23 depicts the fraction hemolysis at 500 nM (Alternative 500 nM hemolysis) and the IC₅₀ for each protease (20% plasma pre-incubation).

TABLE 23
Assessment of Hemolysis and Plasma Activity by a Panel of MT-SP1 mutants

| | | | | Classical | Alternative | |
|---|---|---|---|---|---|---|
| | | Classical | Alternative | IC₅₀ | IC₅₀ | |
| | | 200 nM | 500 nM | Hemolysis | Hemolysis | Plasma |
| CB# | Mutations | Hemolysis | Hemolysis | (nM) | (nM) | Activity |
| CB200 | wt | 0.14 | 0.14 | 131 | 545 | 0.2 |
| CB12 | F97D | 0.109 | 0.229 | 127.15 | | 0.2 |
| CB16 | Y146F | 0.058 | 0.049 | 182.6 | 204.95 | 0.23 |
| CB17 | L172N | 0.198 | 0.044 | 211.7 | 180 | 0.19 |
| CB20 | Q175D | 0.106 | 0.071 | 125.4 | 138.4 | 0.13 |
| CB21 | Q175E | 0.156 | 0.047 | 123.7 | 81.7 | 0.16 |
| CB42 | Y146E | 0.072 | 0.088 | 91.6 | 117.5 | 0.19 |
| CB43 | Y146A | 0.195 | 0.226 | 160.2 | | 0.07 |
| CB44 | Y146W | 0.229 | 0.114 | 157.33 | | 0.14 |
| CB45 | Y146R | 0.195 | 0.297 | 170.42 | | 0.07 |
| CB66 | K224A | 0.236 | 0.097 | 166.3 | 102.2 | 0.24 |
| CB80 | R60cD | 0.085 | 0.463 | 82 | 367 | 0.23 |
| CB82 | R60cW | 0.147 | 0.48 | 74.8 | 283 | 0.29 |
| CB155 | Y146D/K224F | 0.09 | 0.29 | 94 | 221 | 0.36 |
| CB212 | Y146N/K224F | 0.477 | 0.538 | 371.5 | | 0.47 |
| CB213 | Y146E/K224F | 0.188 | 0.21 | 168.5 | | 0.29 |
| CB214 | Y146A/K224F | 0.197 | 0.32 | 171.25 | | 0.42 |
| CB216 | Q192V/K224F | 0.892 | 0.866 | 1200 | | 0.47 |
| CB0218 | Q192F/K224F | 0.975 | 0.947 | 1000 | | 0.09 |
| CB219 | Y146D/Q192A/K224F | 0.929 | 0.887 | 1100 | | 0.63 |
| CB232 | Y146E/K224L | 0.024 | 0.082 | 74.8 | 94.2 | 0.23 |
| CB235 | Y146E/K224A | 0.035 | 0.126 | 96.7 | 89.8 | 0.26 |
| CB238 | Y146D/K224L | 0.023 | 0.105 | 91.4 | 149.3 | 0.53 |
| CB244 | Y146D/K224R | 0.046 | 0.562 | 66.08 | 617.5 | 0.18 |
| CB245 | Y146D/K224N | 0.05 | 0.51 | 127.84 | 421.5 | 0.32 |
| CB251 | Y146E/K224R | 0.052 | 0.47 | 57.57 | 625 | 0.19 |
| CB252 | Y146E/K224N | 0.025 | 0.405 | 38.98 | 451.5 | 0.27 |
| CB255 | Y146E/K224T | 0.115 | 0.84 | 179.46 | 580.1 | 0.55 |
| CB257 | Y146E/K224Y | 0.032 | 0.548 | 118.65 | 158 | 0.44 |
| CB268 | Q221aD | 0.049 | 0.359 | 55.3 | 512 | 0.2 |
| CB274 | G147E | 0.102 | 0.441 | 80.7 | 311.5 | 0.23 |
| CB331 | I41D/Y146D/K224L | 0.8 | 0.19 | 325.15 | 76.4 | 0.34 |
| CB332 | I41E/Y146D/K224L | 0.254 | 0.124 | 150.05 | 52.3 | 0.53 |
| CB349 | I41D/Y146D/K224F | 0.775 | 0.188 | 359.28 | 110.17 | 0.61 |
| CB350 | I41E/Y146D/K224F | 0.729 | 0.24 | 284.14 | 177.07 | 0.69 |
| CB351 | I41T/Y146D/K224F | 0.144 | 0.245 | 50.31 | 71.25 | 0.71 |
| CB353 | H143V/Y146D/K224F | 0.278 | 0.193 | 160.85 | 461.4 | 0.26 |
| CB357 | I41T/Y146D/K224L | 0.068 | 0.203 | 88.58 | 126.26 | 0.41 |
| CB367 | Y146D/Q175D/K224R | 0.1 | 0.219 | 86 | 146.92 | 0.31 |
| CB373 | Y146E/Q175D/K224R | 0.093 | 0.268 | 73.48 | 123.2 | 0.34 |
| CB377 | Y146E/Q175D/K224N | 0.052 | 0.284 | 58.7 | 102.87 | 0.61 |
| CB381 | Y146D/Q175H/K224L | 0.169 | 0.219 | 111.55 | 291.86 | 0.25 |
| CB383 | Y146D/Q175L/K224L | 0.153 | 0.137 | 88.03 | 266.25 | 0.14 |
| CB385 | Y146D/Q175F/K224L | 0.184 | 0.207 | 123.13 | 472.11 | 0.18 |
| CB387 | Y146D/Q175W/K224L | 0.147 | 0.115 | 91.2 | 224.69 | 0.25 |
| CB388 | Y146D/Q175Y/K224L | 0.272 | 0.194 | 114.83 | 317.21 | 0.23 |
| CB403 | Y146D/D217F/K224L | 0.262 | 0.406 | 152.37 | 221.09 | 0.054 |
| CB409 | I41A/Y146D/K224F | 0.22 | 0.174 | 281.2 | | 0.498 |
| CB412 | I41L/Y146D/K224F | 0.165 | 0.247 | 262.5 | | 0.547 |
| CB413 | I41F/Y146D/K224F | 0.222 | 0.215 | 251.11 | | 0.446 |
| CB421 | I41T/Y146D/Q175D/K224F | 0.714 | 0.271 | 478.9 | | 0.585 |
| CB422 | I41T/Y146E/Q175D/K224N | 0.05 | 0.15 | 50.35 | | 0.511 |
| CB423 | I41T/Y146E/K224L | 0.061 | 0.176 | 180.19 | | 0.221 |
| CB450 | I41T/Y146D/G151L/K224F | 0.255 | 0.223 | 269.14 | | 0.287 |
| CB451 | Y146D/Q221aL/K224S | 0.147 | 0.416 | 130.46 | 173.07 | 0.12 |
| CB458 | Y146E/Q221aE/K224R | 0.136 | 0.58 | 93.25 | 332.95 | 0.21 |
| CB464 | Y146E/Q221aE/K224F | 0.02 | 0.124 | 52.3 | 91.15 | 0.54 |
| CB486 | I41T/Y146E/Q175D/K224R | 0.014 | 0.128 | 43.36 | | |
| CB487 | I41T/Y146E/G151L/Q175D/K224N | 0.026 | 0.173 | 52.87 | | 0 |
| CB488 | I41T/Y146E/G151L/Q175D/K224F | 0.086 | 0.195 | 72.61 | | |
| CB489 | I41T/Y146E/G151L/Q175D/K224L | 0.038 | 0.143 | 50.56 | | |
| CB490 | I41T/Y146E/G151L/Q175D/K224R | 0.031 | 0.125 | 52.63 | | |

[0577] 2. Alternative Hemolytic Assay: Preincubation with 90% Plasma

[0578] The modified alternative hemolytic assay can be adapted further to measure the inhibitory activity of proteases, such as for example those with low activity, by adjusting the plasma and protease concentrations. Proteases were initially diluted in GVB/Mg/EGTA to a concentration of 50 μM for screening protocols, while serial dilutions of the proteases from 200 μM to 1.56 μM were used for protocols to determine the IC₅₀. MT-SP1 or modified proteases were preincubated with a final concentration of 90% plasma in a well of a 96-well polypropylene plate by combining 2 μl of the diluted protease solution with 18 μl of human plasma (with sodium citrate as an anticoagulant; Innovative Research, Inc.). This resulted in a further dilution of the protease to give a final concentration of 5.0 μM protease for the screening protocol, and 20 μM to 0.156 μM protease for the IC₅₀ protocol. A no-protease control (18 μl plasma and 2 μl GVB/Mg/EGTA) and a background control (20 μl GVB/Mg/EGTA only) also were included in the assays. The reaction was incubated at room temperature for 1 hour. After the incubation, 80 μl of GVB/Mg/EGTA was added to the incubated plasma/protease mix, followed by the addition of 20 μl of washed chicken cells (described above), giving a final plasma concentration of 15%. The plates were shaken at 37° C. for 1 hour. The cells were spun down at 2000 rpm for 5 minutes to pellet the unbroken cells, and 100 μl of the supernatant was removed and placed in a clear 96-well microtiter plate. Release of hemoglobin from the lysed red blood cells was monitored by reading the optical density (OD) at 415 nm. The fraction hemolysis was calculated by subtracting the background control from all of the wells, then dividing the experimental samples by the no-protease control where the fraction of hemolysis of the positive control was set at 1.00. The IC₅₀ (nM) of hemolysis by the proteases were measured by plotting the fraction hemolysis vs protease concentration on a 4 parameter logistic curve fit (SoftMax Pro software, Molecular Devices, CA).

[0579] Modified MT-SP1 CB450 was assessed for in vitro alternative pathway-induced hemolysis following preincubation with 90% plasma. Preincubated protease/plasma mixtures (at a final concentration of 20 nM to 2000 nM protease) were incubated with chicken cells at a final plasma concentration of 15% and hemolysis was assessed as described above. The results show that CB450 dose-dependently decreased hemolysis induced by 15% plasma, with no detectable hemolysis of the red blood cells observed at about 500 nM or greater CB450 protease.

### Example 8

### Detection of Complement-Induced Hemolysis of Red Blood Cells Using Complement-Depleted Sera

[0580] a. To assess complement activation by purified complement factors treated in the presence or absence of wildtype MT-SP1, CB155, or CB42 protease, purified complement factors C2, C3, C4, and C5 and C2-, C3-, C4- and C5-complement depleted media were purchased from Quidel. Purified complement proteins (C2, C3, C4, or C5) were incubated with 100 nM wildtype MT-SP1, CB155 or CB42 protease at 37° C. for 3 hours. The concentration of the purified protein used in the reaction was 5 μM. One microliter of the reaction along with 1 μl of the appropriate complement depleted sera was added to 100 μl of sensitized sheep red blood cells and assayed for hemolytic activity as described in Example 7 above. The CH50 values of hemolysis were determined. The fraction of hemolysis of the samples was determined by comparing the CH50 value of the sample to the C2-sera containing sample containing no added protease which was set at 1.00 Table 24 depicts the raw fraction of hemolysis values. Wildtype MT-SP1, CB155, and CB42 proteases inactivate C2 and C3, but not C4 and C5 as determined by an inhibition of hemolysis.

TABLE 24
Hemolysis by Protease-incubated Complement Proteins Added
Back to Complement-depleted Sera

| | Fraction of |
|---|---|
| Protease | Hemolysis |
| C2 | 1 |
| C2 + WT | 0 |
| C2 + CB155 | −0.00104 |
| C2 + CB42 | 0.071429 |
| C3 | 1.032325 |
| C3 + WT | 0.008342 |
| C3 + CB155 | 0.07195 |
| C3 + CB42 | 0.122449 |
| C4 | 0.957766 |
| C4 + WT | 0.970027 |
| C4 + CB155 | 0.944142 |
| C4 + CB42 | 1.040816 |
| C5 | 0.983651 |
| C5 + WT | 0.888283 |
| C5 + CB155 | 0.942779 |
| CB + CB42 | 1.020408 |

[0581] b. In another experiment, a panel of complement proteins were treated in the presence or absence of MT-SP1 (CB200), CB252, and CB377 to assess consequences on inactivation of purified complement proteins by the proteases. Purified complement proteins (all from Quidel; San Diego, Calif.) were incubated at their physiological serum concentrations (C1q: 180 μg/ml; C2: 25 μg/ml; C3: 1000 μg/ml; C4: 500 μg/ml; C5: 75 μg/ml; C6: 70 μg/ml; C8: 80 μg/ml; C9: 60 μg/ml) in PBST with 25 nM CB200, CB252, or CB377 protease. One μl of the reaction was added to 100 μl of sensitized sheep red blood cells in the presence of 1 μl of sera that was depleted for the corresponding complement factor (all depleted sera purchased from Quidel). As controls, a no protease control, depleted sera only, and normal sera only were included in the reactions. The samples were incubated in wells of a 96-well plate for 1 hour at room temperature with shaking. The cells were spun down by centrifugation to pellet the unbroken cells, and 85 μl of the supernatant was removed and transferred to a clear 96-well microtiter plate. Release of hemoglobin from the lysed red blood cells was monitored by reading the optical density (OD) at 415 nm. The results showed that the control depleted sera in the absence of the added corresponding purified complement protein showed little to no hemolysis as assessed by the OD415 reading, whereas the control normal sera exhibited hemolysis as assess by an OD415 of about 0.4. For each of the reactions where the corresponding purified complement protein was added back to the depleted sera (no protease control), the OD415 reading was comparable to that observed with the normal sera. Preincubation of the complement proteins C1q, C3, C4, C5, C6, C7, C8, or C9 with CB200, CB252, or CB377 showed no decreased hemolysis as compared to normal sera or the no protease control. In contrast, preincubation of C2 with CB200, CB252, or CB377 resulted in an inhibition of hemolysis as assessed by a reduced OD415 absorbance to levels comparable to the depleted sera control.

### Example 9

### Visualization of the Proteolytic Cleavage of Complement Component C2 in Human Plasma by Western Blotting

[0582] a. To visualize the proteolytic cleavage products, human plasma was diluted to 5% in 40 μl PBST and purified CB155, CB200, or CB42 was added to a final concentration between 0 and 500 nM. The samples were incubated for 1 hour at 37° C. Twenty microliters of the reaction, or purified complement C2 as a control (CompTech), was separated by SDS-PAGE on a 4-12% Tris-Glycine gel at 200 V for 35 minutes using a Novex Mini-Cell Surelock apparatus (Invitrogen), then transfered to PVDF membrane (Invitrogen) using a Biorad Transblot SD semi-dry transfer cell. The membrane was blocked 1 hour with 5% dry milk in TBST (tris-buffered saline with 1% Tween 20) followed by washing and incubation with 1:3000 dilution of goat anti-human C2 antisera (Quidel) in 5% dry milk/TBST overnight at 4° C. The membrane was washed again three times in TBST for 10 minutes each wash, and incubated with 1:10,000 HRP conjugated rabbit anti-goat antibody (Invitrogen, Carlsbad, Calif.) in 5% dry milk/TBST for one hour at room temperature. The filter was washed three times in TBST for 10 minutes each wash, and the C2 in the plasma, and its cleavage products, were developed with ECL Plus Western Blotting Detection System (Amersham Biosciences) according to the manufacturer's instructions. Densitometry was performed on a FluorChem imaging system (Alpha Innotech Corp.) using AlphaEase FC Fluorchem 8800 software, version 3.1.2 (Alpha Innotech Corp.). Densitometry was used to determine the ratio of uncleaved product to cleaved product. The IC₅₀ of the proteases for cleavage of C2 was determined to be as follows: CB200: 15.7 nM; CB155: 18.4 nM; and CB42:11.9 nM.

[0583] b. In another experiment, the cleavage of C2 and C3 by wildtype MT-SP1 (CB200) and mutant MT-SP1 CB252 and CB377 was compared. Nine microliters of human citrated plasma (Innovative Research) was incubated with 1 μl of protease to give a final concentration of protease ranging from 0 to 2000 nM. Incubations were performed for 1 hour at 37° C. One microliter of the preincubated protease/plasma reaction was combined with 10 μl (for assessment of C2) or 1000 μl (for assessment of C3) NuPAGE LDS same buffer and sample reducing reagent (Invitrogen, Carlsbad, Calif.) and boiled for 5 minutes. In parallel, 10 μl of the boiled samples were loaded onto 4-12% NuPAGE Bis-Tris gradient gels (Invitrogen) and run at 200 V for 35 minutes using the Novex Mini-Cell Surelock apparatus (Invitrogen) for protein separation, followed by transfer to a PVDF membrane filter (Invitrogen) using a Biorad Transblot SD semi-dry transfer cell. The membranes were blocked with 5% dry milk (Biorad, Hercules, Calif.) in TBST (tris-buffered saline with 1% Tween 20) for 1 hour. The membranes were then incubated with goat anti-human C2 (Quidel) or goat anti-human C3 at 1:2000 in 5% dry milk/TBST overnight at 4 C. The membranes were washed three times in TBST for 10 minutes, and then incubated with HRP-conjugated anti-goat secondary antibody (Zymed; San Francisco, Calif.) at 1:2000 in 5% dry mil/TBST for one hour at room temperature. The membranes were washed three times in TBST for 10 minutes, and developed with ECL Plus Western Blotting Detection System (Amersham Biosciences; Piscataway, N.J.). Densitomery was performed with a FluorChem imaging system (Alpha Innotech Corp; San Leandro, Calif.) using Alpha Ease FC Fluorchem 8800 software, version 3.1.2 (Alpha Innotech Corp). The results show that each of CB200, CB252, and CB377 cleaved C2 in human plasma in a dose-dependent manner whereas none of the tested proteases cleaved C3 in human plasma as compared to the no protease control even at the highest concentration of protease (2000 nM). Degradation of C2 was noticeable by Western blot at 500 nM of each of the tested proteases with little to no detectable C2 observed at 1000 nM and complete degradation of C2 evident at 2000 nM of tested proteases.

### Example 10

### Assessment of Alternative and Classical Hemolysis and Correlation with Proteolytic Cleavage of Complement Component C3 in Human Plasma

[0584] A panel of proteases were screened at a final concentration of 200 nM (classical) or 500 nM (alternative) for their effects on classical hemolysis or alternative hemolysis, respectively, following preincubation with human plasma as set forth in Example 7, A.1 and B.1 as described above. The panel of proteases that were tested included wildtype (CB200), CB238, CB331, CB349, CB357, CB367, CB377, and CB387. CB200, CB357, CB367, and CB387 inhibiting both the classical and alternative hemolysis to varying degrees. CB238 and CB377 showed little alternative hemolysis inhibition, but did show substantial inhibition of classical hemolysis. CB331 and CB349 showed little classical hemolysis inhibition, but did exhibit inhibition of alternative hemolysis. The results showed that CB331, CB349, and CB387 were selective for cleaving the alternative pathway as compared to the classical pathway.

[0585] The hemolysis results were correlated to cleavage of C3 in plasma as assessed by the visualization of C3 in the presence or absence of protease. Samples from the alternative hemolysis assay also were examined by Western blot for C3 as described in Example 9 above. Consistent with the alternative hemolysis results, the results show that CB331, CB349, and CB387 cleave C3 as assessed by decreased C3 product as compared to the no protease treated plasma sample.

### Example 11

### Cleavage of Purified Complement Components and Identification of Cleavage Sites

[0586] To determine increased specificity of modified proteases for a target protein compared to a scaffold or wildtype protease, purified complement factors C2, iC3, and iC4 were purchased from Quidel Corporation (San Diego, Calif.). 5 μg of each protein was diluted to a final concentration of 5 μM in PBST. MT-SP1, CB155, or Factor I were added to a final concentration of 100 nM, and the reaction was incubated at 37° C. for 5 hours. N-linked glycosylation was removed by denaturing the protein and treating with PNGaseF according to the manufacturer's protocol (New England BioLabs, Ipswich, Mass.). The target proteins were separated by SDS-PAGE on a 4-12% Tris-Glycine gradient gel (Invitrogen, Carlsbad, Calif.) followed by transfer to a PVDF membrane. The resulting membrane was stained with Coomassie Brilliant Blue R-250 stain (TekNova, Hollister, Calif.), rinsed with 50% methanol until the protein band resolved, and air dried. Proteolytic fragments were sequenced according to the Edmans' protocol by the UC Davis Molecular Structure Facility to determine the cleavage sequences. Table 25 below depicts the protease cleavage sequences of human C2, C3, and C4. Where cleavage occurred, the respective cleavage sites on C2, C3 and C4, as identified from sequencing of the cleavage products, are shown for the natural protease Factor I, cathepsin K, MT-SP1, and modified MT-SP1 (CB 155). The respective SEQ ID NOS are indicated in parentheses next to the sequence.

TABLE 25
Protease Cleavage Sequences

| | | MT-SP1 | CB155 | Cathepsin K | Factor I |
|---|---|---|---|---|---|
| Human C2 | | GATR (391) | GATR (391) | | |
| | | SLGR (392) | SLGR (392) | | |
| | | VFAK (393) | | | |
| Human C3 | Beta chain | | REFK (394) | | |
| | Alpha chain | GLAR (395) | QHAR (398) | LGLA (399) | LPSR (388) |
| | | RLGR (396) | | LSVV (400) | SLLR (389) |
| | | AEGK (397) | | | |
| Human C4 | Beta chain | | | | |
| | Alpha chain | HRGR (390) | | | HRGR (390) |
| | Gamma chain | | | | |

### Example 12

### Correlation of C2 Cleavage with Complement Inactivation: Assessment of the Formation of C3 Convertase and Hemolysis

[0587] C3 convertase is formed by the interaction of C1 complex with C4 and C2. Activation of the C1r protease in the C1 complex cleaves C1s yielding an active C1s protease. C4 is a sensitive substrate for C1s, thereby resulting in cleavage of C4 into C4a and C4b. The generation of an active C4b provides a binding site for C2, a second substrate for C1s. Cleavage of C2 results in the formation of fragments C2a and C2b. Upon cleavage by C1s, the C4b and C2b fragments become associated, which together form the C3 convertase of the classical pathway. The SLGR cleavage site present in C2 is the natural activation site for C2 cleavage yielding C2a and C2b, whereas the VFAK cleavage sequence in C2 is present within the protease domain of C2 in the C2a portion of the molecule. To assess whether cleavage of cleavage sequences in C2 by wildtype or modified MT-SP1 affects activation of C2 and the formation of C3 convertase, cleavage was assessed and the functional consequences of cleavage was determined in an in vitro reconstituted cell surface hemolysis model.

A. C2 Cleavage

[0588] The presence of C2a and C2b cleavage products was assessed after cleavage of purified C2 by wildtype MT-SP1 (CB200), CB252, or CB377. To assess cleavage products upon incubation of purified C2 with proteases, 5 μg of purified C2 (Quidel) was incubated alone or with a final concentration of 100 nM CB200, CB252, or CB377 protease for 1 hour at 37° C. The entire reaction was separated by SDS-PAGE on a 4-12% Tris-Glycine gradient gel (Invitrogen, Carlsbad, Calif.) followed by transfer to a PVDF membrane. The resulting membrane was stained with Coomassie Brilliant Blue R-250 stain (TekNova, Hollister, Calif.), rinsed with 50% methanol until the protein band resolved, and air dried. The results show that in the presence of 100 nM CB200, CB252 or CB377, C2 was almost completely degraded to yield cleavage products of about 70 kD and 23 kD corresponding to C2a and C2b, respectively. In addition, in the presence of CB200 a third cleavage product of about 35 kD was observed.

B. Cell Surface Hemolysis Model

[0589] The activity of MT-SP1 or modified protease on the C2 protein specifically was assayed by isolating cells in the intermediate stages of complement activation and exposing them to plasma or protein treated with the protease. Briefly, activated erythrocytes were stopped at the C1/C4b complex stage using the method of Nagaki et al (1974, A New Method for the Preparation of EAC14 cell with Human or Guinea-Pig Serum. Journal of Immunological Methods 5:307-317.) Purchased activated erythrocytes (Diamedix Corp) were washed three times by pelleting the cells at 2000 rpm followed by resuspension into GGVB-TTHA (50% GVB⁰ (Diamedix Corp.)+5% glucose+5 mM Ca-TTHA (equal parts of 100 mM CaCl₂ with 100 mM TTHA (Sigma)), and after the final wash were resuspended at 5×10⁸ cells/mL and stored on ice. The cells were mixed with 2.5 volumes of 10% normal human serum (NHS; made in GGVB-TTHA and incubated 15 minutes at 30° C. to ensure the chelation of Mg²⁺) and incubated for 5 minutes at 30° C. The mixture was washed two times with GGVB-TTHA, washed two times with GGVB-Ca (50% GVB⁰+5% glucose+0.3 mM CaCl₂), and washed two times with GGVB++ (50% GVB⁰+5% glucose+1 mM MgCl₂+0.15 mM CaCl₂). After the final wash, the cell mixture was incubated 2 hours at 37° C. with mixing every 30 minutes to avoid excess settling of the cells. The incubated cell mixture was washed one time in GGVB++, and resuspended at 1.5×10⁸ cells/mL. The suspension was stored up to 1 week at 4° C.

[0590] During complement activation, the C1/C4b complex is required to cleave C2 generating C3 convertase and the resultant activation of the remainder of the complement cascade resulting in the formation of the membrane attack complex (MAC) and cell lysis. To assess the consequences of C2 cleavage by protease, a 2× protease solution of any of CB200, CB252, CB377 was serially diluted by diluting a stock solution of the protease to 2 μM in GGVB++ and serially diluting this stock 1:2 across 11 wells of an opaque 96 well assay plate (Nunc) for final protease concentrations of 0.2 nM to 2000 nM. GGVB++ buffer alone was added to the 12th well as a background control. A 40% solution of C3 depleted sera (Sigma) was made by dilution with GGVB++. Five microliters of serially diluted 2× protease (from above) was mixed with 5 μL diluted C3-depleted sera and incubated for 1 hour at 37° C. The reaction was diluted to 50 μL with GGVB++ and 50 μL EAC14b cells (at 1.5×10⁸ cells/mL) were added. The mixture was incubated for 6 minutes at 30° C. to pre-form the C2 complex. 150 μL C2 depleted sera, diluted 1:100 in GGVB-EDTA (50% GVB⁰+5% glucose+10 mM EDTA), was added to each well. Samples were incubated 1 hour at 37° C. with gentle shaking. The plate was spun at 2000 rpm to pellet the cells and 100 μl of the supernatant was transferred into a clear 96 well assay plate. Release of hemoglobin from the lysed red blood cells was monitored by reading the optical density (OD) at 415 nm.

[0591] The results show that C3 depleted sera pre-incubated with increasing concentrations of proteases (CB200, CB252, or CB377) conferred reduced hemolysis of erythrocytes containing preformed C1/C4b when added to sera depleted for C2. The affects of each of the tested proteases was dose-dependent with little to no inhibition evident at concentrations ranging from 0.2 nM to 10 nM of protease, with successive inhibition occurring at increasing protease concentrations with little to no hemolysis observed at protease concentrations of 800 nM or more. These results suggest that preincubation of sera containing C2 in the presence of proteases does not mimic cleavage of C2 by C1/C4b required for complement activation and cell lysis.

### Example 13

### Determination of the Inhibitory Cleavage Site by Paired SDS-PAGE and Hemolytic Assays

[0592] To correlate protease cleavage of complement components with inhibition of complement activation, purified complement factors were purchased from Quidel and CompTech. 5 μg of each protein was diluted to a final concentration of 5 μM in PBST. A scaffold or modified protease was diluted to a final concentration between 0 and 500 nM. Samples were incubated for 1 hour at 37° C. 0.5 to 1 μg of the treated complement component was removed and diluted to a total volume of 10 μl with PBST. This reaction was mixed with 250 μl IgG-activated sheep's red blood cells and 5 μl media depleted of the corresponding complement factor to be assayed. The solution was allowed to incubate at room temperature for 45 minutes. The cells were spun down at 5000 rpm for 2 minutes and 200 μl of the supernatant was transferred to a 96-well microtiter plate and absorbance at 415 nm was measured to determine release of hemoglobin from the lysed red blood cells.

[0593] The remaining 4 to 4.5 μg of the reaction sample was deglycosylated according to the manufacturer's protocol for PNGaseF (New England BioLabs). The samples were separated by SDS-PAGE on a 4-12% Tris-Glycine gradient gel followed by staining with Coomassie Brilliant blue stain. Using the densitometry feature on an Alpha Innotech Imager, the area of each band was determined and used to calculate the percentage of the full length complement component cleaved throughout the assay and the appearance of all major degradation products.

### Example 14

### Correlation of C2 Cleavage with Complement Inactivation as Assessed by Hemolysis in C2 Depleted Sera

[0594] The functional consequence of C2 cleavage of complement-mediated hemolysis was assessed in a paired SDS-PAGE and hemolytic assay as described above in Example 13. To assess complement activation by purified complement factors, purified C2 and C2-depleted media were purchased from Quidel. 0.5 to 1 μg of purified C2 was incubated with 10 to 500 nM CB155 protease in a total of 10 μl PBST for 1 hour at 37° C. The entire reaction was added to 250 μl of IgG-activated sheep's red blood cells along with 5 μl of plasma depleted of the C2 complement factor being assayed. The solution was allowed to sit at room temperature for 45 minutes. The cells were spun down at 5000 rpm for 2 minutes and 200 μl of the supernatant was transferred to a 96-well microtiter plate and absorbance at 415 nm was measured to determine release of hemoglobin from the lysed red blood cells.

[0595] To visualize the proteolytic cleavage products, twenty microliters of the reaction, or purified complement C2 as a control (CompTech), was separated by SDS-PAGE on a 4-12% Tris-Glycine gel and total protein was visualized by staining the gel with Coomassie Blue according to the manufacturer's protocol. The cleavage of C2 was compared using gel densitometry. Cleavage of C2 occurred in a dose-dependent manner with almost complete cleavage of C2 occurring at 500 nM of protease. Further, the percent hemolysis decreased with increasing concentrations of the protease. The IC₅₀ of CB155 based on gel densitometry of C2 cleavage products was 2.2 nM. The IC₅₀ of CB155 for hemolysis in C2 depleted serum supplemented with protease-treated C2 was 17 nM. In vitro, complete degradation of purified C2 is required for the functional decrease in hemolysis.

### Example 15

### Detection of C5b-9 (Membrane Attack Complex) by ELISA and Effects of MT-SP1 or Mutants on Complement Activation

A. C5b-9 ELISA

[0596] ELISAs for C5b-9 were performed according to the manufacturer's protocol (Quidel). Briefly, microtiter plates coated with the capture antibody were rehydrated with SuperBlock (Pierce, Rockford, Ill.) for 30 minutes at room temperature. The plates were washed in PBST and 20 μl of the protease-treated, complement stimulated serum solution from above diluted with 80 μl SuperBlock was added to wells of a microtiter plate. The plates were incubated at room temperature for 1 hour and then washed in PBST. 100 μl of the detection antibody-HRP conjugate solution was added and the plates were incubated for 1 hour and then washed in PBST. Finally, 100 μl of the substrate solution was added and the plates were incubated about 15 minutes at room temperature to develop. To stop the developing reaction, 100 μl of stop solution was added to each well and absorbance at 450/650 nm was measured according to the manufacturer's protocol.

B. Effects of wildtype MT-SP1 (CB200), CB155 or CB42 on Complement Activation

[0597] To detect complement activation, human plasma with sodium citrate as an anticoagulant (Innovative Research, Inc., Southfield, Mich.) was diluted into PBS with 0.05% Tween 20 (PBST) to a final concentration of 20% (10 μl serum in 40 μl PBST), to which wildtype MT-SP1, CB155, or CB42 were added to a final concentration of 0-5 μM. The solution was incubated at 37° C. for 15 minutes. Activation of the classical pathway and activation of the alternative pathway was initiated by the addition of lipopolysaccharide (IgG or LPS, respectively at 1 mg/ml final concentration, Sigma). The reaction was incubated at 37° C. for 30 minutes. The reaction was quenched by adding Pefabloc (Roche) to a final concentration of 1 mg/ml and EDTA to a final concentration of 50 mM. 20 μl of the final solution was used for the subsequent ELISA. The ELISA was performed as described in part A above.

[0598] The IC50 of C5b-9 generation for each of the proteases was determined. The IC₅₀ following activation of the classical pathway for wildtype MT-SP1, CB155, and CB42 was determined to be 103 nm, 47 nm, and 23 nm, respectively. The IC₅₀ following activation of the alternative pathway for wildtype MT-SP1, CB155, and CB42 was determined to be 195 nm, 84 nm, and 41 nm, respectively.

### Example 16

### Effects of wildtype MT-SP1 (CB200), CB252 or CB377 on Complement Activation in a Total Complement System Screen

[0599] To assess the affect of MT-SP1 or mutant MT-SP1 proteases on the classical, MBL, or alternative complement pathways, 9 μl of human citrated plasma (Innovative Research) was incubated with 1 μl of CB200, CB252, or CB377 protease to give a final concentration of 1 μM of protease for 1 hour at 37° C. Each of the reactions were assessed for complement activation using the Total Complement System Screen Classical, Lectin, Alternative Pathways, according to the protocol from the manufacturer (WiesLab; Sweden). In this assay, the wells of the microtiter strips provided by the manufacturer are coated with specific activators of the classical, alternative, or MBL (lectin) pathways. The reaction was diluted into the appropriate buffer provided by the manufacturer to give the concentration of plasma for each pathway and the reaction was incubated as defined by the manufacturer. For the classical pathway, the plasma sample was diluted in Dilutent CP and left at room temperature for a maximum of 60 minutes before analysis. For the lectin pathway, the plasma sample was diluted in Diluent LP and incubated at room temperature for greater than 15 minutes but less than 60 minutes before analysis. For the alternative pathway, the plasma sample was incubated in Diluent AP and left at room temperature for a maximum of 60 minutes before analysis. To the microtiter plate, samples were added at 100 μl/well in duplicate. The plate was incubated for 60-70 minutes at 37° C. After the serum incubation, the wells of the microtiter plate were washed three times with 300 μl washing solution. After the final wash, excess wash buffer was removed by tapping the plate on an absorbent tissue. Complement activation was assessed in each sample by detection of C5b-9. 100 μl of the conjugate contain alkaline phosphatase-labelled antibodies to C5b-9 was added to each well and the plate incubated for 30 minutes at room temperature. To develop the reaction, 100 μl substrate solution was added to each well and the plate incubated at room temperature for 30 minutes. The reaction was stopped by adding 5 mM EDTA at 100 μl/well. The absorbance was read at 405 nm using a microplate readed. The fraction of sC5b-9 generated was determined by comparing the OD405 value of the sample to a no protease control sample.

[0600] The results show that the fraction C5b-9 generated upon complement activation induced by the classical and MBL pathways was almost completely inhibited in the presence of each of the tested proteases (CB200, CB252, or CB377). In contrast, little to no inhibition of C5b-9 generation was observed by any of the tested proteases when complement activation was induced by the alternative pathway. Since the classical and MBL pathways require C2, but the alternative pathway does not, these results suggest that inhibition of the classical and MBL pathways is due to cleavage of C2. This result is consistent with the observation that each of the tested proteases (CB200, CB252, and CB377) when preincubated with C2 inhibit hemolysis (see Example 8.b above).

### Example 17

### Screening for Preferential Cleavage of SLGR or GLAR versus RQAR Substrates

[0601] Modified proteases that match the desired specificity profiles, as determined by substrate libraries, were assayed using individual peptide substrates corresponding a desired cleavage sequence to determine the magnitude change in specificity. One native target substrate was designed: Ac-RQAR-AMC, which includes the MT-SP1 auto-activation site; and two desired substrate cleavage sequences were designed: Ac-SLGR-AMC (C2 cleavage site) and Ac-GLAR-AMC (C3 cleavage site).

[0602] The substrates were diluted in a series of 12 concentrations between 1 mM and 2 μM in 50 μl total volume of MT-SP1 activity buffer in the wells of a Costar 96 well black half-area assay plate. The solution was warmed to 30° C. for five minutes, and 50 μL of a protease solution (wildtype MT-SP1, CB42, or CB155) was added to the wells of the assay. The fluorescence was measured in a fluorescence spectrophotometer (Molecular Devices Gemini XPS) at an excitation wavelength of 380 nm, an emission wavelength of 450 nm and using a cut-off filter set at 435 nm. The rate of increase in fluorescence was measured over 30 minutes with readings taken at 30 second intervals. The kinetic constants k_{cat}, Kₘ, and k_{cat}/Kₘ (specificity constant) were calculated by graphing the inverse of the substrate concentration versus the inverse of the velocity of substrate cleavage, and fitting to the Lineweaver-Burk equation (1/velocity=(Kₘ/Vₘₐₓ)(1/[S])+1 /Vₘₐₓ; where Vₘₐₓ=[E]*k_{cat}). The proteases wildtype MT-SP1 (CB200), CB42, and CB155 cut the Ac-RQAR-AMC substrate at 1.9×10⁶, 1.8×10⁶, and 9.1×10⁴ M⁻¹s⁻¹, respectively. The proteases wildtype MT-SP1 (CB200), CB42, and CB155 cut the Ac-SLGR-AMC substrate at 2.0×10⁴, 5.9×10⁴, 3.7×10³ M⁻¹s⁻¹, respectively. The proteases wildtype MT-SP1 (CB200), CB42, and CB155 cut the Ac-GLAR-AMC substrate at 6.4×10⁴, 6.3×10⁴, and 3.5×10³ M⁻¹s⁻¹, respectively.

### Example 18

### Screening for Cleavage of Individual Substrates versus a Full-Length Protein

[0603] The specificity of a wildtype or modified protease to a substrate cleavage sequence versus a full length complement protein was determined by comparing the specificity constant (k_{cat}/kₘ) to measure how well a substrate is cut by a particular protein. A peptide substrate cleavage sequence was designed containing a C2 cleavage sequence: Ac-SLGR-AMC. The specificity constant (k_{cat}/Kₘ) of cleavage was determined as described above in Example 17 by incubating the substrate cleavage sequence with a protease (wildtype MT-SP1 (CB200), CB42, or CB155) and the rate of increase in fluorescence was determined.

[0604] In gel kinetics was used to determine the specificity constant of the target complement protein C2. The kinetics of cleavage of the C2 target protein was assayed by following by SDS-PAGE the depletion of the target in the presence of a small amount of protease over a time course. For this assay, 5 mM C2 was incubated with 10 nM protease (wildtype MT-SP1 (CB200), CB42, or CB155) in MTSP activity buffer at 37° C. for 5 hours. Aliquots were removed at 0, 10, 20, 40, 60, 100, 200 and 300 minutes, and immediately diluted and boiled in reducing agent. The samples were treated with PNGase F (New England BioLabs), separated by SDS-PAGE, and stained with Coomassie Brilliant Blue. The density of the full length protein band was determined using the Alpha Innotech Gel Imager. The specificity constant, k_{cat}/Kₘ was determined by non-linear fitting of the curve produced by plotting the integrated density value versus time with the equation:
density=exp(−1*time*[enzyme]*k_{cat}/Kₘ).

[0605] The results show that the specificity constant of cleavage of a substrate peptide sequence versus a full length protein by the proteases followed a similar pattern. The CB200 wildtype MT-SP1 showed almost identical specificity constants for cleavage of the substrate peptide sequence versus the C2 full length protein, whereas CB42 and CB155 showed slight variation in their specificity constants. The specificity constant of cleavage of the Ac-SLGR-AMC substrate sequence by CB200, CB42, and CB155 was 2.0×10⁴, 5.9×10⁴, and 3.7×10³ M⁻¹s⁻¹, respectively. The specificity constant of cleavage of the C2 protein by CB200, CB42, and CB155 was 1.95×10⁴, 3.60×10⁴, and 7.20×10⁴ M⁻¹s⁻¹, respectively.

### Example 19

### Cynomolgus Hemolysis Protocol

[0606] The functional activity of the Cynomolgus monkey complement system following protease treatment also can be assessed using modified hemolytic assays.

[0607] A. Sensitization of Chicken Red Blood Cells

[0608] Chicken red blood cells were isolated from Chicken Alsevers (50% mix of whole blood from chickens and alsevers solution, which contains anti-coagulants; Colorado Serum Company, CO). The cells were resuspended by gently pipetting up and down until no cell pellet was visible and 50 μl of cells were diluted into 1 ml GVB++ buffer. The volume of cells was scaled as necessary for each experiment assuming that 10 μl per well of the final 1 ml suspension would be added to each well so that a dilution of 50 μl cells was sufficient for one plate. The cells were washed by pelleting the cells at 2500 rpm in a tabletop centrifuge at 4° C. for 1 minute, the supernatant discarded, and cells resuspended in 1 ml GVB++ by gently pipetting up and down. The washing steps were repeated twice more or until the supernatant was completely clear upon the last spinning. One μl of anti-chicken erythrocyte antibody (Fitzgerald industries) was added to sensitize the cells. After the antibody—cell suspension was mixed, the solution was incubated on ice for a minimum of 15 minutes, then centrifuged at 2000 rpm in a tabletop centrifuge at 4° C. for 2 minutes. The supernatant was discarded and the sensitized cells were resuspended in 1 mL GVB++ and washed a further 2 times by centrifugation at 2000 rpm for 1 minute until the supernatant was clear. After the final wash, the cell pellet was resuspended in a final volume of 1 ml GVB++ and the cells were diluted 10:50 in GVB++ (i.e. 1 ml of resuspended sensitized cells 5 mL GVB++ for a total volume of 6 ml). Sensitization of the chicken cells with antibody was performed fresh the day of the experiment. The sensitized cells were not kept overnight.

[0609] B. Hemolysis Assay From in vivo Pharmacodynamic (PD) Experiments

[0610] Hemolysis reactions were set up at a final concentration of 1%, 2.5%, and 10% plasma for each plasma sample obtained from protease treated animals or vehicle control (no protease) treated animals in the presence of sensitized erythrocytes. Absorbance controls containing no added concentrated sensitized erythrocytes also were set up in parallel for each sample. All reactions were set up in opaque plates with point divots. For the 1% plasma samples, the hemolysis samples (in duplicate) were set up with 10 μl sensitized erythrocytes, 89 μl GVB++, and 1 μl plasma from protease or no-protease treated animals; and the corresponding absorbance controls were set up with 99 μl GVB++ and 1 μl of plasma from protease treated animals. For the 2.5% plasma samples, the hemolysis samples (in duplicate) were set up with 10 μl sensitized erythrocytes, 87 μl GVB++ and 2.5 μl plasma from protease or no protease treated animals; and the corresponding absorbance controls were set up with 97 μl GVB++ and 2.5 μl plasma from protease treated animals. For the 10% plasma samples, the hemolysis samples (in duplicate) were set up with 10 μl sensitized erythrocytes, 80 μl GVB++, and 10 μl plasma from protease or no protease treated animals; and the corresponding absorbance controls were set up with 90 μl GVB++ and 10 μl plasma from protease treated animals. The plates were incubated with shaking at 37° C. for 30 minutes. The cells were centrifuged at 2000 rpm for 5 minutes to pellet the unbroken cells, and 80 μl of the supernatant was removed and placed in a clear 96-well round-bottom microtiter plate. This was done carefully since the samples were sometimes gelatinous. The samples that were gelatinous were noted. The supernatant-transferred plates were centrifuged at 2500 rpm for 5 minutes to remove bubbles. Centrifugation was repeated until no bubbles persisted or, alternatively, remaining bubbles were popped with an 18 G needle. Release of hemoglobin from the lysed red blood cells was monitored photometrically by reading absorbance at 415 nm on a Biorad Microplate Reader Model 680. If the absorbance was greater than 1, the samples were diluted 1:3 in GVB++ and read again (i.e. 20 μl sample into 40 μl GVB++). The fraction hemolysis was calculated by subtracting the absorbance from the absorbance control samples from the corresponding hemolysis well, then dividing the experimental samples by the no-protease vehicle control sample. ED50 values were determined by graphing the OD415 nm value as a function of protease concentration.

[0611] C. In Vitro Titration Hemolysis Assay

[0612] For an in vitro titration of proteases using cynomolgus monkey plasma, proteases at 10% of the final reaction volume were incubated with purchased cynomolgus monkey plasma (i.e. in polypropylene 96-well plates, 2 μl of the protease solution was added to 18 μl cynomolgus monkey plasma) to give final protease concentrations of protease of ranging from 20 μM to 0.156 μM for the IC₅₀ titration protocol, and a plasma concentration of 90%. A no-protease (18 μl plasma and 2 μl GVB/Mg/EGTA) and background (20 μl GVB/Mg/EGTA only) controls also were included in the assays. The reaction was incubated at room temperature for 1 hour. After preincubation of the protease with 90% plasma, hemolysis was performed as described in part B above. No absorbance controls were included in the in vitro hemolysis titration.

### Example 20

### Mouse Hemolysis Protocol

[0613] A. Hemolysis Assay From in vivo Pharmacodynamic (PD) Experiments

[0614] The functional activity of the mouse complement system following protease treatment also can be assessed using modified hemolytic assays. Erythrocytes used in the mouse hemolysis protocols also were chicken red blood cells which were sensitized as described in Example 19, part A above. Hemolysis reactions were set up at a final concentration of 40% plasma for each plasma sample obtained from protease treated animals or vehicle control (no protease) treated animals in the presence of sensitized erythrocytes. Absorbance controls containing no added concentrated sensitized erythrocytes also were set up in parallel for each sample at half the plasma concentration (20% plasma), such that the absorbance control values were subtracted twice from the hemolysis values during analysis as discussed below. The hemolysis samples were set up in duplicate (if enough plasma allowed) in opaque plates with divots by adding 60 μl of concentrated sensitized erythrocytes and 40 μl of plasma from protease or no protease treated animal to each well. The corresponding absorbance control was set up by adding 80 μl GVB++ and 20 μl mouse plasma from protease or no protease treated animals to each well. The plates were incubated with shaking at 37° C. for 1 hour. The cells were centrifuged at 2000 rpm for 5 minutes to pellet the unbroken cells, and 50 μl of the supernatant was removed and placed in a clear 96-well round-bottom microtiter plate. This was done carefully since the samples were sometimes gelatinous. The samples that were gelatinous were noted. The supernatant-transferred plates were centrifuged at 2500 rpm for 5 minutes to remove bubbles. Centrifugation was repeated until no bubbles persisted or, alternatively, remaining bubbles were popped with an 18 G needle. Release of hemoglobin from the lysed red blood cells was monitored by reading at 415 nm. If the absorbance was greater than 1, the samples were diluted 1:3 in GVB++ and read again (i.e. 20 μl sample into 40 μl GVB++). The fraction hemolysis was calculated by subtracting the 2× absorbance absorbance control samples from the corresponding hemolysis well, then dividing the experimental samples by the no-protease vehicle control. ED50 values were determined by graphing the OD415 nm value as a function of protease concentration.

[0615] B. In Vitro Titration Hemolysis Assay

[0616] For an in vitro titration of proteases using mouse plasma, proteases at 10% of the final reaction volume were incubated with purchased mouse plasma or in-house control plasma (i.e. in polypropylene 96-well plates, 2 μl of the protease solution was added to 18 μl plasma) to give final protease concentrations of protease of ranging from 20 μM to 0.156 μM for the IC₅₀ titration protocol, and a plasma concentration of 90%. A no-protease (18 μl plasma and 2 μl GVB/Mg/EGTA) and background (20 μl GVB/Mg/EGTA only) controls also were included in the assays. The reaction was incubated at room temperature for 1 hour. After preincubation of the protease with 90% plasma, hemolysis was performed as described in part A above. No absorbance controls were included in the in vitro hemolysis titration.

### Example 21

### Classical C3b Deposition ELISA

[0617] To detect and quantitate C3b deposition, 96 well Maxisorp plates (Nunc) were coated with 100 μl/well of 0.5% ovalbumin for 2 hrs at 37° C. or overnight at 4° C. The plates were washed 3 times with 250 μl PBST using a Molecular Devices SkanWasher 300 Version B. The plates were coated with 100 μl/well of rabbit anti-chicken egg albumin antibody (MP Biomedicals) dilted 1:1000 in PBS. The plates were incubated for 1 hr at room temperature or overnight at 4° C. before being washed 3 times with PBST. The plates were blocked with 200 μl Blocking Buffer (30% BSA Solution; Serologicals), and the plates were shaken at room temperature for 1 hour. After washing 3 times with PBST, 100 μl of plasma sample, diluted to the desired percentage (i.e. 1%, 10%) in GVB++ (Veronal (barbital)-buffered saline, pH 7.4, containing 142 mM NaCl, 4.9 mM sodium Veronal, 0.1% gelatin, 0.15 mM CaCl₂, and 1 mM MgCl₂; Comptech), was added to each well, and the plates were shaken at room temperature for 30 minutes. The wells were washed 3 times with PBST. Goat anti-human C3b antibody (Quidel) diluted 1:4000 in blocking buffer was added to the wells at a volume of 100 μl, and the plates were shaken at room temperature for 1 hour. After washing with PBST, 100 μl HRP-rabbit anti-goat conjugated antibody (Zymed) diluted 1:8000 in blocking buffer was added to the wells and allowed to incubate for 1 hour with shaking at room temperature. The wells were washed with PBST and the ELISA was developed according to the manufacturers instructions by the addition of 100 μl TMB substrate (Pierce). The reaction was stopped by the addition of 100 μl 2M H₂SO₄ and the absorbance at 405 nm was read on a SpectraMax M5 plate reader (Molecular Devices).

### Example 22

### Mouse Pharmacodynamic (PD) Analysis of Protease

[0618] A. Pharmacodynamics of CB450

[0619] Mice (n=6 for each dose) were injected intravenously with a bolus of CB450 at varying dosages ranging (0 mg/kg, 2.5 mg/kg, 5 mg/kg, 10 mg/kg, and 15 mg/kg). Plasma was collected from the treated mice at 5 minutes post-injection by cardiac puncture. Complement activity of the plasma samples from the different treatment groups were tested by hemolysis assay as described in Example 20 or by C3b deposition as determined by a C3b ELISA described in Example 21.

[0620] The results of the hemolysis experiment showed that there was a dose-dependent decreased hemolysis of erythrocytes induced by mouse plasma from CB450 treated mice as assessed by absorbance levels at 415 nm. Plasma samples from mice treated with no protease induced hemolysis in this assay as assessed by an absorbance at 415 nm of about 0.23, which decreased to about 0.1 in the 2.5 mg/kg CB450 treatment group with little to no detectable absorbance signal measured in samples from mice treated with 5, 20, or 15 mg/kg of CB450.

[0621] The C3b ELISA was performed using 1% or 10% plasma from each of the treatment groups. The fraction hemolysis from the no protease treated sample was set at 1.0 and the fraction hemolysis of all experimental samples was accordingly determined. Thus, for both the 1% and 10% plasma samples from mice treated with no protease, the fraction of C3b deposition was measured to be 1. The results of the C3b ELISA on the 10% plasma samples showed that the plasma from mice treated with increasing doses of CB450 showed no measurable difference in C3b levels at doses of CB450 of 2.5, 5, or 10 mg/kg as compared to the no protease treated sample, however, mice treated with 15 mg/kg exhibited a decreased fraction of C3b deposition which was measured to be about 0.40. The results of the C3b ELISA on the 1% plasma samples showed that plasma from mice treated with CB450 had a dose-dependent decrease in the fraction C3b deposition as compared to the no protease treated plasma sample, which was consistent with the results observed in the hemolysis experiment. Plasma samples from mice treated with 2.5 mg/kg CB450 exhibited a decreased C3b deposition which was measured to be about 0.40, while plasma from mice treated with 5, 20, or 15 mg/kg CB450 showed little to no detectable C3b.

[0622] B. Pharmacodynamics of a Panel of MT-SP1 Protease Mutants

[0623] Mice were injected intravenously with a bolus of increasing concentrations of a panel of MT-SP1 mutants including CB200 (wild-type), CB238, CB245, CB252, CB255, CB257, CB268, CB351, CB377, CB409, CB422, CB450, CB464, and CB473. Plasma was collected from the treated mice at 5 minutes post-injection by cardiac puncture. Complement activity of the plasma samples from the different treatment groups were tested by hemolysis assay as described in Example 19 or by C3b deposition as determined by a C3b ELISA (assayed in 1% and 10% plasma) as described in Example 20. The results were graphed as a function of protease concentration to determine the ED50 values. A summary of the results are depicted in Table 26 below. The Table also sets forth the maximum tolerated dose (MTD) of protease and the therapeutic index (TI) calculated as the ratio of MTD to ED50. The results show differences in the in vivo efficacy of some of the tested proteases.

TABLE 26
Mouse Pharmacodynamics

| | | | | C3b in 1% | | C3b in 10% | C3b TI |
|---|---|---|---|---|---|---|---|
| | MTD | Hemolysis | Hemolysis | plasma (ED50; | C3b TI (1% | plasma (ED50; | (10% |
| PROTEASE | (mg/kg) | (ED50; mg/kg) | TI | mg/kg) | plasma) | mg/kg) | plasma) |
| CB200 | 10 | 6.4 | 1.56 | 2.7 | 3.7 | 13.5 | 0.74 |
| CB238 | 15 | 9.4 | 1.6 | 6.1 | 2.46 | 16.2 | 0.92 |
| CB245 | 10 | 2.4 | 4.1 | 2.63 | 3.8 | >10 | 0 |
| CB252 | 12.5 | 5.7 | 2.19 | 3.8 | 3.29 | 9.9 | 1.26 |
| CB255 | 7 | 5 | 1.4 | 2.78 | 2.52 | >7 | 0 |
| CB257 | 5 | 3.1 | 1.6 | 4.86 | 1.03 | >5 | 0 |
| CB268 | 10 | 9.9 | 1 | 5.45 | 1.8 | >10 | 0 |
| CB351 | 10 | 6.6 | 1.52 | 5.8 | 1.72 | 10.8 | 0.93 |
| CB377 | 15 | 8.6 | 1.75 | 2.6 | 5.77 | 6.2 | 2.42 |
| CB409 | 15 | 8.2 | 1.8 | 3.2 | 4.65 | 17.99 | 0.83 |
| CB422 | 12.5 | 10.25 | 1.22 | 3.82 | 3.27 | 20.36 | 0.61 |
| CB450 | 15 | 1.8 | 8.5 | 3.5 | 4.3 | 15.9 | 0.9 |
| CB464 | 15 | 7.72 | 1.94 | 5.07 | 2.96 | 33.1 | 0.45 |
| CB473 | 12.5 | 14.25 | 0.86 | 1.95 | 6.41 | 8.01 | 1.56 |

### Example 23

### Rat Pharmacodynamic (PD) Analysis of Protease

A. CB252 and CB377

[0624] Rats were injected intravenously with a bolus of CB252 (23 mg/kg) followed by infusion for 1 hour at 3.3 mg/kg/hr or with a bolus of CB377 (18 mg/kg) followed by infusion for 1 hour at 1.8 mg/kg/hr. Rats treated with a vehicle control also were included in the study. Plasma was collected at various time points after injection (where t=0 is pre-injection; i.e. 0, 5, 15, 30, 60, or 120 minutes) and analyzed for complement activity by assaying for C2 cleavage by Western Blot as set forth in Example 9 (except that only 1.5 μl of plasma was used) and for hemolysis using the Cynomolgus hemolysis protocol as set forth in Example 19 using either 1% or 10% rat plasma.

[0625] The results showed increased cleavage of C2 in plasma from CB252 and CB377 treated rats. CB252 showed a greater cleavage of C2 as there was little detectable C2 present in the plasma samples as assessed by Western Blot even after only 5 minutes following injection, with no detectable C2 present at 60 or 120 minutes after injection. CB377 also showed diminished C2 levels as compared to vehicle control at early time points, however, by 60 minutes and 120 minutes the levels of C2 were comparable to those from vehicle control samples.

[0626] The results of hemolysis induced by 10% plasma from the treated rats showed that plasma from CB377 had no effect on the inhibition of hemolysis as compared to vehicle control, while plasma from CB252 showed a marked inhibition of hemolysis. Plasma samples from rats treated with CB252 collected at 5, 15, 30, and 60 minutes after injection showed little to no detectable hemolysis. Hemolysis was increased to levels comparable to vehicle control by plasma from CB252 treated mice at later time points (i.e. by 90 and 120 minutes). The effects of CB252 and CB377 was more pronounced when hemolysis was induced by 1% plasma from each of the treated rats. The fraction hemolysis (set at 1.0 for the t=0 time point vehicle control sample) induced by 1% plasma from vehicle control rats did not change among the tested time points and was always around about 1.0. Plasma from rats treated with CB252 induced no detectable hemolysis at any of the collected time points. Plasma from CB377 treated rats also showed reduced hemolysis as compared to plasma from vehicle control treated animals at all time points, although to a lesser extent than plasma from CB252 treated rats. Hemolysis was reduced to the greatest extent in plasma collected 15 minutes after injection of CB377 with a reported fraction of hemolysis of about 0.2 as compared to plasma control treated mice, and steadily increased at longer time points after injection to about 0.6 at 120 minutes after injection.

[0627] B. Comparison of CB200, CB155, and CB42

[0628] Rats were injected intravenously with a bolus of CB200 (wildtype), CB155, and CB42 at 2 mg/kg, 10 mg/kg, and 25 mg/kg. Plasma was collected at various time points after injection (where t=0 is pre-injection) up to about 1380 minutes after injection and analyzed for complement activity by assaying for hemolysis using the Cynomolgus hemolysis protocol as set forth in Example 19 using 1% plasma. The results show that plasma from rats treated with CB200 or CB42 at 2 mg/kg and 10 mg/kg exhibited levels of hemolysis comparable to levels observed at t=0 before pre-injection of the protease. Plasma from rats treated with 25 mg/kg of CB200 or CB42 induced reduced hemolysis of erythrocytes at early time points, with little to no hemolysis observed at time points up to about 60 minutes after injection of the protease. Hemolysis was increased to levels comparable to hemolysis at t=0 before pre-injection of the protease from plasma samples collected by 1380 minutes after injection of CB200 or CB42. Plasma from CB155 treated rats, however, showed decreased hemolysis at all doses tested. Treatment of rats with 2 mg/kg or 10 mg/kg showed slight but reproducibly decreased hemolysis induced by plasma collected at early time points as compared to t=0 before pre-injection of the protease. Plasma samples collected at about 30 minutes after rats receiving a dosage of 2 mg/kg or 10 mg/kg of CB155 resulted in an observed OD415 of hemolysis of about 0.3 or about 0.25, respectively, as compared to about 0.45 for t=0 (no protease) plasma samples. Plasma collected at 240 minutes or longer after preinjection of CB155 at 2 mg/kg and 10 mg/kg induced hemolysis to levels comparable to that observed from t=0 treated animals. Plasma from rats treated with 25 mg/kg of CB155 induced reduced hemolysis of erythrocytes at early time points, with little to no hemolysis observed at timepoints up to about 240 minutes after injection of the protease. Hemolysis was increased to levels comparable to hemolysis at t=0 before pre-injection of the protease from plasma samples collected by 1380 minutes after injection of CB155. These results show that CB155 has a greater in vivo pharmacodynamic efficacy on complement inactivation than do CB200 and CB42 as assessed in this experiment.

### Example 24

[0629] Cynomologus Monkey Pharmacodynamic (PD) Analysis of Protease

A. CB252 Cynomolgus ex vivo Complement Inhibition

[0630] Two naive male and two naive female cynomolgus monkeys (approximately 2.2-4.4 kg, and 2-4 years of age at initiation of treatment) were assigned to a single treatment group. Each animal was permanently tattooed with a unique identification number and assigned to a 14-day acclimation period prior to dosing. Study animals were intravenously administered 1 and 3 mg/ml doses of CB252 at volumes of 5 mg/kg. Blood samples for ex vivo pharmacodynamic analyses were collected at scheduled time points (Pre-injection, i.e. t=0; 5 minutes, 30 minutes, and 60 minutes post-injection). Blood was collected by venipuncture from a peripheral vein of restrained, conscious animals. Blood samples were collected from spare animals to be used as baseline values. Approximately 1 ml of blood was transferred to a tube treated with lithium heparin, placed on ice, and then centrifuged at 2000 g for 15 minutes at 4° C. within 30 minutes of collection. Plasma obtained was divided into two approximately equal aliquots and then transferred to cyrovials which were frozen on dry ice. Samples were stored at approximately −60° C. or colder prior to thawing and analysis. Plasma samples were tested for effects on complement activation by assaying for C2 cleavage by Western Blot, C3b deposition by ELISA at 1% and 10% plasma concentration, and through hemolysis of sensitized chicken red blood cells at 1%, 2.5%, and 10% plasma.

[0631] 1. C2 Cleavage

[0632] C2 cleavage in the plasma samples was assessed by Western Blot as described in Example 9 with the following modifications: 1 μl plasma, boiled with NuPAGE LDS sample buffer and sample reducing agent (Invitrogen) for 5 minutes, was used in the analysis; goat anti-human C2 was diluted to 1:2000 in 5% dry milk/TBST; and HRP-conjugated anti-goat secondary was diluted to 1:4000 in 5% dry milk/TBST. The results showed that ex vivo plasma from cynomolgus monkeys dosed with bolus IV injection of 1 or 3 mg/kg CB252 demonstrated partial cleavage of C2 at 3 mg/kg only. Plasma from monkeys treated with 1 mg/kg CB252 had no discernable C2 cleavage. Plasma collected from monkeys treated with 3 mg/kg CB252, there was a significant C2 cleavage observed for all three animals for which plasma samples were available. The average extent of degradation of C2 as determined by densitometry of C2 Western blots was 60% degraded at 5 minutes, 50% degraded at 30 minutes, and 40% degraded at 60 minutes. The percent inhibition of complement as assessed by C2 cleavage in plasma from all animals treated with 3 mg/kg CB252 are summarized in Table 27 below.

TABLE 27
CB252 Ex Vivo Complement Inhibition: C2 cleavage

| | Animal | | |
|---|---|---|---|
| Time point | 2 | 4 | 5 |
| 5 minutes | 62% | 55% | 65% |
| 30 minutes | 55% | 45% | 50% |
| 60 minutes | 50% | 37% | 38% |

[0633] 2. C3b Deposition

[0634] C3b deposition in the plasma samples was assessed by ELISA as described in Example 21. In the C3b deposition assay no significant inhibition of complement was observed in plasma samples from monkeys administered with 1 mg/kg CB252 administered for any animal at any time point assayed. At the 3 mg/kg dose of CB252, at 10% plasma, C3b deposition was inhibited by an average of approximately 50% at the 5 minute time point, 30% at the 30 minute time point, and 15% at 60 minutes. The level of inhibition by CB252 was observed to be greater when measured in 1% plasma. For the 3 mg/kg dose of CB252, at 1% plasma, C3b deposition was inhibited by an average of approximately 70% at 5 minutes, 55% at 30 minutes, and 50% at 60 minutes. The percent inhibition of complement as assessed by C3b deposition in plasma from all animals treated with 3 mg/kg CB252 are summarized in Table 28 below.

TABLE 28
CB252 Ex Vivo Complement Inhibition: C3b deposition

| | 10% plasma | | | 1% plasma | | |
|---|---|---|---|---|---|---|
| | Animal | | | Animal | | |
| Time point | 2 | 4 | 5 | 2 | 4 | 5 |
| 5 minutes | 52% | 45% | 50% | 50% | 74% | 77% |
| 30 minutes | 37% | 38% | 13% | 25% | 60% | 40% |
| 60 minutes | 40% | 10% | 3% | 82% | 16% | 78% |

[0635] 3. Hemolysis

[0636] Hemolysis was assessed in the sensitized chicken red blood cell (RBC) hemolysis assay as described in Example 19. The results showed that plasma from monkeys treated with 1 mg/kg dose of CB252 exhibited no observable effect on hemolysis of sensitized chicken RBC for any animal at any time point assayed. Plasma samples from monkeys treated with 3 mg/kg CB252 showed significant inhibition of hemolysis at the various time points assayed, and inhibition was observed at 1%, 2.5% and 10% plasma. In 10% plasma, plasma from monkeys treated with 3 mg/kg CB252 showed an average of 80% inhibition of hemolysis at 5 minutes, 45% inhibition at 30 minutes, and 25% inhibition at 60 minutes. In 2.5% plasma, plasma from monkeys treated with 3 mg/kg CB252 showed an average of 92% inhibition of hemolysis at 5 minutes, 80% inhibition at 30 minutes, and 65% inhibition at 60 minutes. In 1% plasma, plasma from monkeys treated with 3 mg/kg CB252 showed an average of 99% inhibition of hemolysis at 5 minutes, 98% inhibition at 30 minutes, and 90% inhibition at 60 minutes. The percent inhibition of complement as assessed by hemolysis of chicken RBCs by plasma from all animals treated with 3 mg/kg CB252 are summarized in Table 29 below.

TABLE 29
CB252 Ex Vivo Complement Inhibition: Hemolysis

| | 10% Plasma | | | 2.5% Plasma | | | 1% Plasma | | |
|---|---|---|---|---|---|---|---|---|---|
| Time point | Animals | | | Animals | | | Animals | | |
| (minutes) | 2 | 4 | 5 | 2 | 4 | 5 | 2 | 4 | 5 |
| 5 | 55% | 90% | 80% | 90% | 95% | 91% | 96% | 95% | 97% |
| 30 | 43% | 65% | 30% | 85% | 91% | 62% | 96% | 95% | 91% |
| 60 | ND | 40% | 10% | 98% | 78% | 21% | 96% | 91% | 79% |

ND: not determined

[0637] In summary, cynomolgus plasma from monkeys treated with a single bolus intravenous injection of 1 mg/kg CB252 did not show significant inhibition of complement as measured by C2 degradation, C3b deposition ELISA, or hemolysis of sensitized chicken red blood cells. Cynomolgus plasma from monkeys treated with a single bolus intravenous injection of 3 mg/kg CB252 did show significant inhibition of all ex vivo complement assays at the 5 minute and 30 minute time points. At the least stringent assay levels, 1% plasma in C3b deposition ELISA and 1% hemolysis, significant inhibition persists to the 60 minute time point.

B. Pharmacodynamic Efficacy of CB252 Compared to Other MT-SP1 Mutants in Cynomolgus

[0638] Monkeys were injected intravenously with a bolus of CB252 or CB377 at 1 mg/kg and 3 mg/kg protease. Plasma was collected at various time points after injection (where t=0 is pre-injection; i.e. 0, 5, 30, and 60 minutes) and analyzed for complement activity by assaying for C2 cleavage by Western Blot as set forth in Example 9 and for hemolysis using the Cynomologous hemolysis protocol as set forth in Example 19 using either 1%, 2.5% or 10% monkey plasma.

[0639] The results showed increased cleavage of C2 in plasma from CB252 and CB377 treated monkeys after treatment with 3 mg/kg protease but not after treatment with 1 mg/kg protease. Plasma collected from monkeys treated with 3 mg/kg CB252 and CB377 protease showed a time-dependent cleavage of C2, with greatest C2 cleavage occurring in plasma collected from monkeys at 5 minutes after protease treatment and decreased cleavage occurring at increased timepoints. The results also showed that a greater cleavage of C2 occurred in plasma collected form CB252 treated monkeys as compared to CB377 treated monkeys at all time points tested.

[0640] The results of the hemolysis experiment correlated with the C2 cleavage results since there was no observed difference in hemolysis induced by either 2.5% plasma or 10% plasma from monkeys treated with 1 mg/kg CB252 or CB377 protease at any of the collected time points as compared to hemolysis induced by plasma from monkeys not treated with protease (i.e. t=0). The results also showed that the hemolysis observed using either 2.5% or 10% plasma from monkeys treated with 3 mg/kg CB252 or CB377 was similar. Under both assay conditions, plasma from monkeys treated with 3 mg/kg CB377 showed only a slight decrease in hemolysis of erythrocytes as compared to plasma from t=0. The fraction of hemolysis at t=0 was set at 1.0 and the fraction hemolysis observed from plasma from CB377 treated monkeys was about 0.7 for all time points tested. CB252 was markedly more potent than CB377 in this experiment. Plasma from monkeys treated with 3 mg/kg CB252 collected 5 minutes after injection induced no detectable hemolysis of erythrocytes with an observed fraction hemolysis of at or close to 0. The effects of CB252 on hemolysis was time-dependent since the fraction hemolysis induced from plasma from monkeys treated with 3 mg/kg CB252 increased to about 0.4 and about 0.7 in plasma collected 30 minutes and 60 minutes, respectively, from CB252 treated monkeys.

[0641] In another experiment, the pharmacodynamic efficacy of proteases CB238, CB252, and CB377 was compared upon administration to cynomologous. Monkeys were injected intravenously with a bolus of CB238, CB252 or CB377 at the maximum tolerated dose (MTD) for each protease (i.e. 2 mg/kg, 3 mg/kg, and 3 mg/kg, respectively). Plasma was collected at various time points after injection (where t=0 is pre-injection; i.e. 0, 5, 30, and 60 minutes) and analyzed for complement activity by assaying for the ability to support hemolysis of chicken red blood cells using the Cynomologous hemolysis protocol as set forth in Example 19 using either 2.5% or 10% monkey plasma. The % inhibition of hemolysis was determined as compared to hemolysis induced by 2.5% or 10% plasma collected from t=0 monkeys. The results are summarized in Table 30 below.

TABLE 30
Cynomologous Pharmacodynamics

| | | % inhib | % inhib | % inhib | % inhib |
|---|---|---|---|---|---|
| | | hemol | hemol | hemol | hemol |
| | | (2.5% | (2.5% | (10% | (10% |
| | Monkey MTD | plasma) | plasma) | plasma) | plasma) |
| Protease | (mg/kg) | @ 5 min | @ 30 min | @ 5 min | @ 30 min |
| CB238 | 2 | 24 | 15 | 20 | 11 |
| CB252 | 3 | 92 | 79 | 75 | 46 |
| CB377 | 3 | 18 | 8 | 14 | 7 |

### Example 25

### Examination of the Complement-Mediated Cardiovascular Effects of Proteases Ex Vivo in Rabbit Hearts

[0642] The effects of proteases on complement-mediated injury was assessed ex vivo using the Langendorff Assay to examine cardiac damage in rabbit hearts. Studies on the isolated heart allows for simultaneous observations of a compound's hemodynamic, electrocardiographic, and electrophysiologic effects. New Zealand White rabbits were used in this study because the amino acid sequence of the rabbit Iκᵣ channel shares 99% homology with the human Iκᵣ channel sequence (Wymore et al. (1997) Circ Res., 80: 261-268). The rabbit has been used extensively for cardiovascular studies and is an appropriate species to model potential effects on the human heart, since rabbit cardiac action potentials (similar to human cardiac action potentials) appear to be strongly driven by Iκᵣ (Weirich et al. (1998) Basic Res Cardiol., 93:125-132; Carmeliet et al. (1992) J Pharmacol Exp Ther., 262:809-817). Also, the interaction between human plasma and rabbit heart tissue has been previously characterized and has been shown to be primarily complement mediated (Kilgore et al. (1998) J Pharmacol Exp. Ther., 285: 987-94). For example, contact of human plasma and the foreign surface of the rabbit heart activates complement, which then mediates damage to the myocardium ultimately resulting in asystole. Therefore, this model is appropriate to determine the efficacy of complement inhibitors, such as proteases or modified proteases that target one or more complement components.

A. Experimental Design and Methods

[0643] Rabbits were euthanized via stunning followed by cardiectomy. Hearts were rapidly removed, mounted on a Langendorff apparatus, and perfused with modified, oxygenated, Krebs-Henseleit buffer (37° C.; Krebs-Henseleit buffer: 118.1 mM NaCl, 4.7 mM KCl, 1.17 mM MgSO₄, 1.18 mM KH₂PO₄, 11.1 mM d-glucose, 2.5 mM CaCl₂, 24.8 mM NaHCO₃, and 2.0 mM pyruvate; modified with the addition of 2.5 g of bovine serum albumin/1000 ml of perfusion medium; and oxygenated via pressurized oxygen/carbon dioxide (95%/5%)). A ventricular drain and fluid-filled latex balloon was secured in the left ventricle with a purse string suture at the atrial appendage. A pulmonary artery drain was secured. Hearts were paced via pacing electrodes placed onto the right atrium. Hearts were deemed acceptable for the study if they exhibited acceptable hemodynamic parameters (e.g., dP/dT>1000 mm Hg/sec) throughout the equilibration period.

[0644] The protease test compound (at a final concentration of 1 μM) was incubated with incubation media (containing human plasma diluted to 50% in perfusion buffer; i.e. 12 ml human serum diluted into 12 ml perfusion medium) for 1 hour at 37° C. Following the incubation, the test compound mixture was added to the experimental perfusion medium, reciruculating, to give a final serum concentration of about 4-6% in 300 ml total volume. Isolated rabbit hearts that were previously equilibrated with perfusion medium for 10-15 minutes followed by collection of baseline measurements for 10 minutes, were exposed to perfusion medium containing the incubated test compound mixture for approximately 1 hour with measurements collected continuously as described below. The experiment was terminated if irreversible ventricular fibrillation occurred. Ventricular fibrillation was deemed irreversible if the heart did not spontaneously revert within 90 seconds of initiation. After exposure to the test compounds, the hearts were fixed in O.C.T., frozen on dry ice, and then stored in a freezer set at −80° C. for immunohistochemistry evaluation.

[0645] 1. Hemodynamic Measurements

[0646] The latex balloon in the left ventricle (LV) was expanded with water to achieve an LV end-diastolic pressure (LVEDP) of approximately 5 mmHg. The balloon was connected with tubing to a pressure transducer to measure LEPD, LV diastolic pressure (LVDP) and LV systolic pressure (LVSP). Coronary perfusion was measured with a pressure transducer connected to a side-arm port of the aortic cannula. Hemodynamic measurements were continuously monitored with the Notocord HEM (Kalamazoo, Mich.) v3.5 data capture system. Digital markers were used to indicate test compound exposure periods. LVDP was defined as the difference between LVEDP and LVSP. Both maximal rate of increase in LV pressure (+dP/dt) and minimal rate of decrease in LV pressure (−dP/dt) were measured, as the first derivative of the time from LVEDP to LVSP and LVSP to LVEDP, respectively. Coronary perfusion pressure (CPP) also was measured.

[0647] Hemodynamic measurements from the final minute of the equilibration period (0 min) and during the last minute of each 15 minute period (i.e. 15 min, 30 min, 45 min, 60 min) within the hour of the test compound exposure period were evaluated and used to determine effects of the test compound. Average values taken from five consecutive cardiac cycles uninterrupted by interference of ectopic beats were used for analysis of hemodynamic parameters. Values from each individual heart were pooled to determine an average for each variable at individual concentrations. Average percent change of each variable between baseline and each concentration also was determined. The effect of each test compound on hemodynamic parameters was examined for statistical significance using repeated measures analysis of variance (ANOVA) followed by a post-hoc test for group comparisons when warranted. A value of p<0.05 was considered statistically significant. Data was presented as mean±SEM or percent change from baseline when appropriate.

[0648] 2. Creatine Kinase Concentration Analysis

[0649] Approximately 2.0 ml of perfusion medium was collected just prior to the end of each 15 minute test period from the pulmonary artery drain. Prior to an early termination of the experiment (e.g., due to ventricular fibrillation), a sample was taken for analysis. The samples were frozen on dry ice, and ten stored in a freezer set at −80° C. for analysis.

B. Experimental Results

[0650] One micromolar of CB200, CB155, or CB42 was preincubated with human plasma diluted to 50% in perfusion medium for 1 hour at 37° C. The protease test compound mixture was then diluted to a final concentration of 6% plasma and perfused over isolated rabbit hearts to induce complement activation and the effects of the proteases on complement activation was determined based on hemodynamic measurements. Perfusion of hearts with heat-inactivated plasma was used as a negative control. Maximal rate of increase in LV pressure (+dP/dt) was determined at baseline (0 min), and 15, 30, 45, and 60 minutes after perfusion with the test compound proteases. The results show that plasma alone induced reduced rate of increase in LV pressure indicating damage to the mycocardium. The +dP/dt value was decreased about 5-fold from the baseline value and was similar between all time points tested. In contrast, plasma that was first heat-inactivated showed no change in the +dP/dt value as compared to that observed at baseline indicating no complement activation. Perfusion of rabbit hearts with protease test compounds protected the hearts from complement-mediated injury. Both CB42 and CB155 gave full protection of heart function as indicated by +dP/dt values comparable to baseline levels at all measured time points. CB200 (wildtype), however, only gave partial protection of heart function in this model. At 15 minutes after perfusion with CB200, the heart function observed indicated almost complete protection with +dP/dt value comparable to baseline levels. By 30 minutes, CB200 showed little to no protection of heart function with greater than 3-fold decreased values of +dP/dt observed, approaching the levels observed by treatment of rabbit hearts with plasma alone. The rate of increase in LV pressure levels in rabbits perfused in the presence of CB200 remained low at 45 and 60 minutes indicating cardiac damage at these time points.

### Example 26

### Expression and Purification of Modified MT-SP1 CB238 in Shake Flasks

[0651] CB238 and related recombinant MT-SP1 mutants or wild-type MT-SP1 were cloned and expressed in E. coli as inclusion bodies as described in Example 1 and 2 above. The production of the MT-SP1 or mutants was adapted for laboratory scale by optimizing production of the MT-SP1 mutant CB238 by pooling up to about 44×1 L shake flasks for subsequent isolation of the inclusion body pellets for solubilization and refolding. Briefly, 1 μl of plasmid DNA (from DNA miniprep purification) was mixed with 50 μl of BL-21 cells. The cells were incubated the plasmid DNA on ice for 30 minutes, and then heat shocked at 42° C. for 45 seconds. The cells were then incubated on ice for 2 minutes for recovery. 500 μl of LB (LB; Difco LB Broth Lennox, approximate formulation per liter: 10.0 g Tryptone, 10.0 g Yeast Extract, 5.0 g Sodium Chloride) was added to the cells, and the culture was incubated at 37° C. with shaking for 1 hour. 50 μl of the cells was then plated out on agar plates containing 50 μg/ml carbenicillin for selection. The plate was incubated at 37° C. for 16-18 hours.

[0652] 25 ml of LB containing 50 μg/ml carbenicillin was inoculated from a single colony and grown until fully confluent. 0.5 ml of the seed culture was added to 800 ml of 2XYT containing 10 μg/ml of carbenicillin and grown overnight (˜12-16 hours; approximately 44 flasks). The cells were harvested by centrifugation at 6,000×g in a Sorvall rotor # SLC4000. The cell pellets were pooled and weighed. From 35.2 L of E. coli culture, 320 g of wet cell pellet was obtained. 600 ml of a buffer containing 50 mM Potassium Phosphate (KPO₄) pH 7.4 and 300 mM Sodium Chloride (NaCl) was added to the cell pellet. After the cells were completely resuspended, the batch was split into two and each part was sonicated in a glass vessel on ice. The sonicator was set at 60% duty cycle, output level 8, for 4 minutes. The sonication procedure was repeated two times for each sample. The resulting sonicated sample was centrifuged at 16,900×g for 20 minutes at 4° C. The supernatant was poured out and replaced with ˜300 ml of fresh buffer containing 50 mM KPO₄ pH 7.4, 300 mM NaCl, and 0.5% lauryldimethylamine oxide (LDAO) volume/volume. The inclusion body was resuspended using a spatula and the solution was stirred until homogenous. The stirred sample was then centrifuged again and the supernatant decanted. The LDAO wash was performed a total of three times followed by three rounds of washing with buffer containing 50 mM KPO₄ pH 7.4, 300 mM NaCl that does not contain LDAO.

[0653] To the 70 g of purified wet inclusion body, 700 ml of denaturing buffer (6 M Guanidine HCl in 100 mM Tris pH 8.0, 20 mM dithiothreitol (DTT)) was added, and the protein was solubilized. The sample was then centrifuged at 20,400×g for 30 minutes at 22° C., and the supernatant was collected. The protein solution was then slowly dripped into 35 L of refolding solution (100 mM Tris pH 8.0, 150 mM NaCl, 1.5 M Arginine, 5 mM reduced glutathione, 0.05 mM oxidized glutathione) while vigorously stirring. The protein solution was left at 4° C. for 72 hrs.

[0654] The resulting protein solution was concentrated by hollow filtration to ˜1-2L then dialyzed into 16 L of buffer containing 50 mM Tris pH 8.0, 50 mM NaCl at 4° C. overnight. The buffer was exchanged for fresh buffer the following morning, and the sample was dialyzed for an additional 8 hours. The protease sample was then removed from the dialysis tubing and incubated at room temperature until auto-activation of the protease occurred by cleavage of the proregion to release the mature enzyme. Activity was monitored as described in Example 3 above using a fluorogenic RQAR-AMC substrate and SDS-PAGE. Upon complete activation, the sample was then dialyzed into buffer containing 50 mM HEPES pH 6.5 at 4° C. overnight.

[0655] The protein solution was then loaded onto a Source 15S column (Amersham) and eluted using a buffer gradient from 50 mM HEPES pH 6.5 to 50 mM HEPES pH 6.5 containing 0.15 M NaCl. Prior to all chromatography steps, each column is washed in reverse with 0.5 N NaOH then rinsed with water. The active fractions were pooled. An equal volume of buffer containing 2 M (NH₄)₂SO₄ in 50 mM PO₄ pH 7.0 was added, and the resulting solution was loaded onto a Phenyl Sepharose HP column pre-equilibrated with buffer containing 50 mM PO₄ pH 7.0, 1 M (NH₄)₂SO₄. The active protein was eluted with a buffer gradient from 50 mM PO₄ pH 7.0, 1 M (NH₄)₂SO₄ to 50 mM PO₄ pH 7.0. The active fractions were pooled and buffer exchanged into 50 mM HEPES pH 6.5. The sample was then reloaded and purified on Source 15Q as in the first chromatography step. Active fractions were then pooled, buffer exchanged into PBS using a stirred cell, and concentrated to ˜10 mg/ml. A sample was removed to measure protein concentration, A280. Benzamidine was then added to a final concentration of 20 mM to the remaining sample prior to filtration of the protein sample through a 0.2 uM syringe filter. The protein solution was frozen in liquid nitrogen and stored at −80° C. The final yield was ˜800 mg of pure protein (˜20 mg of protease/L of culture). The purified protein was assayed for specific activity, purity, and endotoxin levels as described in Example 3 above.

[0656] A similar strategy was employed for other MT-SP1 mutants or wildtype MT-SP1. The protocol is altered depending on the specific mutant. For the mutants that don't purify well over Phenyl Sepharose, Benzamidine Sepharose was used instead. For example, the MT-SP1 mutant CB450 is purified over a Benzamidine column.

### Example 27

### Assessment of Hemolysis and Plasma Activity by a Panel of MT-SP1 Mutants

[0657] A panel of proteases were tested for their ability to support classical hemolysis or alternative hemolysis following preincubation with 20% plasma as described in Example 7, part A.1.b and Example 7, part B.1 above. In addition, the proteases were tested for Plasma Activity as described in Example 6. Table 31 depicts the fraction classical hemolysis at 200 nM, the fraction alternative hemolysis at 500 nM, and the IC50 for each protease for both Classical and Alternative hemolysis.

[0658] In addition, the percent protease unbound by alpha-2 macroglobulin (a2M) also was determined. Inactivation of a protease by alpha-2 macroglobulin traps the protease in a complex where it is still able to turn over small fluorescent substrates, but unable to access large protein substrates. This property of alpha-2 macroglobulin complicates the assessment of a proteases activity in plasma. To determine the actual activity of the free, uncomplexed protease in plasma, a two step measurement is required. First, the sample's activity on fluorescent substrates is measured. Second, a macromolecular inhibitor is added to bind all of the free protease (ATIII or M84R ecotin), and the protease activity trapped (and hence protected from inhibition) in alpha-2 macroglobulin is measured. The percent unbound by alpha-2 macroglobulin activity is the percentage of the plasma residual activity that is inhibited by the addition of the ecotin. Briefly, in a 0.2 mL PCR tube, 1 μL 10× protease was mixed with 9 μL human plasma in citrate (Innovative Research). A uninhibted control also was prepeared containing 1 μL 10× protease mixed with 9 μL PBST. The mixtures were incubated for 5 minutes at 37° C. The samples were diluted 250 fold in PBST and stored on ice. Two 50 μL aliquots for each sample were transferred to an opaque assay plate (Costar #3694) containing 2 μL PBST or 2 μL 520 nM M84R ecotin. The plates were incubated 10 minutes at room temperature. Five microliters 0.4 mM Ac-RQAR-AMC substrate was added and the fluorescence was measured over time with a SpectraMax M5 spectrafluorometer (Molecular Devices) set to read every 20 seconds for 30 minutes at 30° C. (Ex: 380 nm, EM: 450 nm, Cut-off: 435 nm). The percent unbound by alpha-2 macroglobulin was calculated with the following formula: (1-([(Protease in plasma/Protease in PBST)−(Protease in plasma+ecotin/Protease in PBST)]/(Protease in plasma/Protease in PBST)))*100. The results of % unbound alpha-2 macroglobulin for the panel of proteases tested is set forth in Table 31 below.

TABLE 31
Assessment of Hemolysis and Activity of a Panel of Proteases

| | | | | Classical | Alternative | | |
|---|---|---|---|---|---|---|---|
| | | Classical | Alternative | IC₅₀ | IC₅₀ | | % |
| | | 200 nM | 500 nM | Hemolysis | Hemolysis | Plasma | Unbound |
| CB# | Mutations | Hemolysis | Hemolysis | (nM) | (nM) | Activity | by a2M |
| CB421 | I41T/Y146D/Q175D/ | 0.714 | 478.90 | 0.271 | | 0.585 | 84% |
| | K224F | | | | | | |
| CB422 | I41T/Y146E/Q175D/ | 0.050 | 50.35 | 0.150 | 111.8 | 0.511 | 83% |
| | K224N | | | | | | |
| CB450 | I41T/146D/G151L/ | 0.255 | 269.14 | 0.223 | 262.4 | 0.287 | |
| | K224F | | | | | | |
| CB476 | I41T/Y146D/Q175D/ | 0.111 | 87.26 | 0.217 | 162.3 | 0.595 | 89% |
| | K224L | | | | | | |
| CB477 | I41T/Y146D/Q175D/ | 0.016 | 53.43 | 0.140 | 116.2 | 0.346 | 67% |
| | K224R | | | | | | |
| CB478 | I41T/Y146D/Q175D/ | 0.254 | 86.48 | 0.316 | 230.3 | 0.550 | 89% |
| | K224N | | | | | | |
| CB480 | I41T/Y146D/G151L/ | 0.272 | 131.01 | 0.367 | 268.1 | 0.670 | 88% |
| | Q175D/K224F | | | | | | |
| CB481 | I41T/Y146D/G151L/ | 0.050 | 143.19 | 0.169 | 154.3 | 0.687 | 72% |
| | Q175D/K224L | | | | | | |
| CB482 | I41T/Y146D/G151L/ | 0.042 | 57.39 | 0.255 | 296.2 | 0.306 | 10% |
| | Q175D/K224R | | | | | | |
| CB483 | I41T/Y146D/G151L/ | 0.076 | 57.39 | 0.425 | 257.3 | 0.642 | 73% |
| | Q175D/K224N | | | | | | |
| CB484 | I41T/Y146E/Q175D/ | 0.235 | 67.21 | 0.365 | 268.5 | 0.649 | 94% |
| | K224F | | | | | | |
| CB485 | I41T/Y146E/Q175D/ | 0.072 | 103.78 | 0.184 | 160.4 | 0.593 | 82% |
| | K224L | | | | | | |
| CB486 | I41T/Y146E/Q175D/ | 0.014 | 43.36 | 0.128 | 125.4 | 0.326 | 44% |
| | K224R | | | | | | |
| CB487 | I41T/Y146E/G151L/ | 0.026 | 52.87 | 0.173 | 169.2 | 0.548 | 53% |
| | Q175D/K224N | | | | | | |
| CB488 | I41T/Y146E/G151L/ | 0.086 | 72.61 | 0.195 | 179.3 | 0.658 | 85% |
| | Q175D/K224F | | | | | | |
| CB489 | 141T/Y146E/G151L/ | 0.038 | 50.56 | 0.143 | 140.8 | 0.526 | 58% |
| | Q175D/K224L | | | | | | |
| CB490 | I41T/Y146E/G151L/ | 0.031 | 52.63 | 0.125 | 193.8 | 0.288 | 0% |
| | Q175D/K224R | | | | | | |

### Example 28

### Additional Mutants

[0659] Additional mutants are prepared as described herein. Such mutants include, but are not limited to, those set forth in Table 32 below.

TABLE 32

| | |
|---|---|
| SEQ | SEQ |

| | | |
|---|---|---|
| Additional Mutants | ID | ID |

| | | |
|---|---|---|
| I41T/Y146D/G151L/K224N | 681 | 696 |
| Y146D/Q175D/K224N | 682 | 697 |
| I41T/Y146D/K224N | 683 | 698 |
| Y146D/G151L/K224N | 684 | 699 |
| Y146D/Q175R/K224N | 685 | 700 |
| Y146D/Q175K/K224N | 686 | 701 |
| Y146D/Q175H/K224N | 687 | 702 |
| I41T/Y146D/G151L/Q175K/K224F | 688 | 703 |
| I41T/Y146D/G151L/Q175R/K224F | 689 | 704 |
| I41T/Y146D/G151L/Q175H/K224F | 690 | 705 |
| I41T/Y146D/G151L/Q175Y/K224F | 691 | 706 |
| I41T/Y146D/G151L/Q175K/K224N | 692 | 707 |
| I41T/Y146D/G151L/Q175R/K224N | 693 | 708 |
| I41T/Y146D/G151L/Q175H/K224N | 694 | 709 |
| I41T/Y146D/G151L/Q175Y/K224N | 695 | 710 |

1. A method of modulating complement activation, comprising contacting a non-complement protease with any one or more target substrates of a complement pathway, whereby a target substrate protein is cleaved such that complement activation in a pathway comprising the target substrate is altered.

2. The method of claim 1, wherein contacting the non-complement protease with any one or more target substrates of a complement pathway occurs in vitro.

3. The method of claim 1, wherein contacting the non-complement protease with any one or more target substrates of a complement pathway occurs in vivo.

4. The method of claim 1, wherein contacting the non-complement protease with any one or more target substrates of a complement pathway occurs ex vivo.

5. The method of claim 1, wherein complement activation is inhibited.

6. The method of claim 1, wherein complement activation is increased.

7. The method of claim 1, wherein the complement pathway is selected from among one or more of the classical, alternative and lectin pathways of complement.

8. The method of claim 1, wherein the target substrate is any one or more of C1q, C2, C3, iC3, C4, iC4, C5, C6, C7, C8, C9, MBL, Factor B, Factor D, Factor P, MASP-1, MASP-2, C1r, C1s, C4b, C4a, C2b, C2a, C3b, C3a, Ba and Bb.

9. The method of claim 1, wherein the target substrate comprises a sequence of amino acids set forth in any one of SEQ ID NOS: 298, 299, 300, 302, 304, 305, 306, 311, 312, 313, 314, 315, 316, 317, 318, 319, 320, 321, 322, 326, 328, 330, 332, 334, 335, 338, 340, and 344, or comprises a fragment thereof that exhibits a complement activity.

10. The method of claim 1 wherein the target substrate is a ficolin.

11. The method of claim 10, wherein the target substrate comprises a sequence of amino acids set forth in any of SEQ ID NOS: 660-662.

12. The method of claim 1, wherein the non-complement protease comprises modifications at any one or more amino acid residues compared to an unmodified or scaffold protease, wherein the modified amino acid residue(s) increases one or both of specificity for a target substrate or activity towards a target substrate.

13. The method of claim 12, wherein the unmodified or scaffold protease is any one of a serine protease, a cysteine protease, an aspartic protease, a threonine protease, or a metallo-protease.

14. The method of claim 13, wherein the scaffold protease is selected from among proteases selected from among granzyme B, granzyme A, granzyme M, cathepsin G, MT-SP1, neutrophil elastase, chymase, alpha-tryptase, beta-trypsase I or II, chymotrypsin, collagenase, factor XII, factor XI, factor CII, factor X, thrombin, protein C, u-plasminogen activator (u-PA), t-plasminogen activator (t-PA), plasmin, plasma kallikrein, chymotrypsin, trypsin, a cathepsin, papain, cruzain, a metalloprotease and allelic variations, isoforms and catalytically active portions thereof.

15. The method of claim 14, wherein the scaffold protease comprises a sequence of amino acids set forth in any one of SEQ ID NOS: 2, 4, 8, 77, 79, 83, 85, 87, 89, 93, 99, 117, 119, 121, 123, 132, 134, 138, 142, 144, 146, 148, 162, 166, 168, 170, 172, 174, 176, 178, 180, 182, 190, 192, 194, 196, 198, 200, 202, 204, 206, 208, 218, 220, 222, 224, 226, 238, 248, 250, 260, 262, 280, 282, 373, 375, 377, 379, 381, 383, 385, 387, 547, 549, and 551 and catalytically active portions thereof.

16. The method of claim 14, wherein the scaffold protease is an MT-SP1 protease.

17. The method of claim 16, wherein an MT-SP1 protease or a catalytically active portion thereof comprises a sequence of amino acids set forth in SEQ ID NO: 2 or 10, or is an allelic or species variant thereof.

18. The method of claim 16, wherein the target substrate is C2 or C3.

19. The method of claim 16, wherein the modification(s) in an MT-SP1 protease or a catalytically active portion thereof are selected from a protease having a modification in position 224 and/or position 146, based on chymotrypsin numbering.

20. The method of claim 18, wherein the modification(s) in an MT-SP1 protease or a catalytically active portion thereof are selected from a protease having a modification in position 224 and/or position 146, based on chymotrypsin numbering.

21. The method of claim 16, wherein the modification(s) in an MT-SP1 protease or a catalytically active portion thereof are selected from a protease having a modification in position 151, based on chymotrypsin numbering.

22. The method of claim 18, wherein the modification(s) in an MT-SP1 protease or a catalytically active portion thereof are selected from a protease having a modification in position 151, based on chymotrypsin numbering.

23. The method of claim 21, wherein the modification in an MT-SP1 protease or catalytically active portion thereof correspond to a protease having a modification selected from among I41T/Y146D/G151L/K224F, I41T/Y146D/G151L/Q175D/K224F, I41T/Y146D/G151L/Q175D/K224L, I41T/Y146D/G151L/Q175D/K224R, AND I41T/Y146D/G151L/Q175D/K224N, I41T/Y146D/G151L/K224N, Y146D/G151L/K224N, I41T/Y146D/G151L/Q175K/K224F, I41T/Y146D/G151L/Q175R/K224F, I41T/Y146D/G151L/Q175H/K224F, I41T/Y146D/G151L/Q175Y/K224F, I41T/Y146D/G151L/Q175K/K224N, I41T/Y146D/G151L/Q175R/K224N, I41T/Y146D/G151L/Q175H/K224N, and I41T/Y146D/G151L/Q175Y/K224N based on chymotrypsin numbering.

24. The method of claim 16, wherein the modifications in the MT-SP1 protease or a catalytically active portion thereof are in any one or more amino acids that contribute to extended substrate specificity or secondary sites of interaction.

25. The method of claim 24, wherein the modifications in a MT-SP1 protease or a catalytically active portion thereof correspond to any one or more of amino acid positions 97, 146, 192, and 224 of an MT-SP1 protease, based on chymotrypsin numbering.

26. The method of claim 25, wherein the modification(s) in an MT-SP1 protease or a catalytically active portion thereof correspond to any one or more of amino acids F97, Y146, Q192, and K224 of the MT-SP1 protease, based on chymotrypsin numbering.

27. The method of claim 26, wherein the modification(s) in an MT-SP1 protease or a catalytically active portion thereof are selected from any one or more of F97D, F97E, F97A, F97W, Y146N, Y146D, Y146E, Y146A, Y146W, Y146R, Q192R, Q192V, K224A, and K224F.

28. The method of claim 16, wherein the modification(s) in an MT-SP1 protease or a catalytically active portion thereof corresponds to a modified MT-SP1 polypeptide having a sequence of amino acids as set forth in any of SEQ ID NOS: 12, 14, 16, 18, 20, 22, 24, 26, 28, 30, 32, 34, 36, 38, 40-69, 404-418, 419-447, 524-533, 552-659, or 663-710.

29. The method of claim 27, wherein the modification(s) in an MT-SP1 protease or a catalytically active portion thereof are Y146D/K224F or Y146E.

30. The method of claim 28, wherein the modification(s) in an MT-SP1 protease or a catalytically active portion thereof correspond to a modified MT-SP1 polypeptide having a sequence of amino acids as set forth in SEQ ID NOS: 596 or 650.

31. The method of claim 16, wherein the modification(s) in an MT-SP1 protease or a catalytically active portion thereof are selected from among F97N, F97D, F97E, F99Y, F99V, F99W, D217A, D217V, F97A, F97W, F99A, Y146N, Y146D, Y146E, Y146A, Y146W, Y146R, W215F, W215Y, Q192V, Q192R, Q192F, K224A, K224F, M180E, Y146D/K224F, D96A, Y146E/K224N, I41T/Y146E/Q175D/K224R, I41T/Y146D/K224F, I41T/Y146E/Q175D/K224N, I41T/Y146E/G151L/Q175D/K224L, Y146E/Q221aE/K224F, I41T/Y146E/G151L/Q175D/K224R, I41T/Y146E/G151L/Q175D/K224N, Q221aD, Y146E/K224R, Y146E/Q175D/K224N, Y146D/K224R, I41T/Y146E/G151L/Q175D/K224F, Y146E/Q175D/K224R, Y146E/L224L, G147E, Y146D/Q175D/K224R, Y146D/Q175L/K224L, Y146D/Q175L/K224L, Y146D/Q175W/K224L, Y146D/K224L, Y146E/Q221aE/K224R, Y146E/K224A, Y146D/Q175H/K224L, Y146D/Q175Y/K224L, Y146E/K224Y, Y146D/Q175F/K224L, Y146D/Q175F/K225L, Y146D/Q221aL/K224S, I41E/Y146D/K224L, Y146D/D217F/K224L, Y146D/D217F/K224L, H143V/Y146D/K224F, Y146E/K224F, Y146A/K224F, Y146E/K224T, I41T/Y146E/K224L, I41F/Y146D/K224F, I41L/Y146D/K224F, I41T/Y146D/G151L/K224F, I41A/Y146D/K224F, I41E/Y146D/K224F, I41D/Y146D/K224L, I41D/Y146D/K224F, Y146N/K224F; I41T/Y146D/Q175D/K224F, Q192F/K224F, Y146D/Q192A/K224F, Q192V/K224F, I41T/Y146D/Q175D/K224L, I41T/Y146D/Q175D/K224R, I41T/Y146D/Q175D/K224N, I41T/Y146D/G151L/Q175D/K224F, I41T/Y146D/G151L/Q175D/K224L, I41T/Y146D/G151L/Q175D/K224R, I41T/Y146D/G151L/Q175D/K224N, I41T/Y146E/Q175D/K224F, I41T/Y146E/Q175D/K224L, I41T/Y146D/G151L/K224N, Y146D/Q175D/K224N, Y146D/Q175D/K224N, Y146D/G151L/K224N, Y146D/Q175R/K224N, Y146D/Q175K/K224N, Y146D/Q175H/K224N, I41T/Y146D/G151L/Q175K/K224F, I41T/Y146D/G151L/Q175R/K224F, I41T/Y146D/G151L/Q175H/K224F, I41T/Y146D/G151L/Q175Y/K224F, I41T/Y146D/G151L/Q175K/K224N, I41T/Y146D/G151L/Q175R/K224N, I41T/Y146D/G151L/Q175H/K224N, and I41T/Y146D/G151L/Q175Y/K224N, based on chymotrypsin numbering.

32. The method of claim 31, wherein the MT-SP1 protease cleaves a target substrate at a substrate recognition site.

33. The method of claim 32, wherein the target substrate is C2 or C3.

34. The method of claim 33, wherein the target substrate is C2 and the substrate recognition site includes a sequence of amino acids of SLGR (SEQ ID NO:392).

35. The method of claim 1, wherein the non-complement protease cleaves a substrate recognition site of a target substrate.

36. The method of claim 35, wherein the non-complement protease cleaves a Factor I substrate recognition site.

37. A method for treating a subject with a complement-mediated disorder, comprising administering a non-complement protease, whereby the non-complement protease cleaves any one or more target substrates of a complement pathway such that complement activation in a pathway comprising the target substrate is altered.

38. The method of claim 37, wherein complement activation is inhibited.

39. The method of claim 38, wherein the inhibition of complement activation leads to a reduction of inflammatory symptoms associated with a complement-mediated disorder selected from among an inflammatory disorder, a neurodegenerative disorder and a cardiovascular disorder.

40. The method of claim 39, wherein the complement-mediated disorder is selected from among sepsis, Rheumatoid arthritis (RA), membranoproliferative glomerulonephritis (MPGN), Multiple Sclerosis (MS), Myasthenia gravis (MG), asthma, inflammatory bowel disease, immune complex (IC)-mediated acute inflammatory tissue injury, Alzheimer's Disease (AD), and Ischemia-reperfusion injury.

41. The method of claim 39, wherein the complement-mediated disorder is Guillan-Barre syndrome.

42. The method claim 40, wherein the ischemia-reperfusion injury is caused by an event or treatment selected from among myocardial infarct (MI), stroke, angioplasty, coronary artery bypass graft, cardiopulmonary bypass (CPB), and hemodialysis.

43. The method of claims 37, wherein the complement-mediated disorder results from a treatment of a subject.

44. The method of claim 43, wherein administering a non-complement protease is effected prior to treatment of a subject.

45. The method of claim 37, wherein administering a non-complement protease is effected by contacting a body fluid or tissue sample in vitro, ex vivo, or in vivo with a non-complement protease.

46. The method of claim 43, wherein the treatment results in complement-mediated ischemia-reperfusion injury.

47. The method of claim 46, wherein the treatment is angioplasty or coronary artery bypass graft.

48. The method of claim 37, wherein the complement pathway is one or more of the classical, alternative and lectin pathways.

49. The method of claim 37, wherein the target substrate is any one or more of C1q, C2, C3, iC3, C4, iC4, C5, C6, C7, C8, C9, MBL, Factor B, Factor D, Factor P, MASP-1, MASP-2, C1r, C1s, C4b, C4a, C2b, C2a, C3b, C3a, Ba and Bb.

50. The method of any of claim 37, wherein the target substrate comprises a sequence of amino acids set forth in any one of SEQ ID NOS: 298, 299, 300, 302, 304, 305, 306, 311, 312, 313, 314, 315, 316, 317, 318, 319, 320, 321, 322, 326, 328, 330, 332, 334, 335, 338, 340, or 344, or comprises a fragment thereof that exhibits a complement activity.

51. The method of claims 37, wherein the target substrate is ficolin.

52. The method of claim 49, wherein the non-complement protease comprises modifications at any one or more amino acid residues compared to an unmodified or scaffold protease, wherein the modified amino acid residue(s) increases one or both of specificity for a target substrate or activity towards a target substrate.

53. The method of claim 52, wherein the unmodified or scaffold protease is any one of a serine protease, cysteine protease, aspartic protease, threonine protease, or metallo-protease.

54. The method of claim 53, wherein the scaffold protease is is selected from among proteases selected from among granzyme B, granzyme A, granzyme M, cathepsin G, MT-SP1, neutrophil elastase, chymase, alpha-tryptase, beta-trypsase I or II, chymotrypsin, collagenase, factor XII, factor XI, factor CII, factor X, thrombin, protein C, u-plasminogen activator (u-PA), t-plasminogen activator (t-PA), plasmin, plasma kallikrein, chymotrypsin, trypsin, a cathepsin, papain, cruzain, a metalloprotease and allelic variations, isoforms and catalytically active portions thereof.

55. The method of claim 54, wherein the scaffold protease comprises a sequence of amino acids as set forth in any one of SEQ ID NOS: 2, 4, 8, 77, 79, 83, 85, 87, 89, 93, 99, 117, 119, 121, 123, 132, 134, 138, 142, 144, 146, 148, 162, 166, 168, 170, 172, 174, 176, 178, 180, 182, 190, 192, 194, 196, 198, 200, 202, 204, 206, 208, 218, 220, 222, 224, 226, 238, 248, 250, 260, 262, 280, 282, 373, 375, 377, 379, 381, 383, 385, 387, 547, 549, and 551 and catalytically active portions thereof.

56. The method of claim 54, wherein the scaffold protease is an MT-SP1 protease.

57. The method of claim 56, wherein an MT-SP1 protease or a catalytically active portion thereof comprises a sequence of amino acids set forth in SEQ ID NO: 2 or 10, or is an allelic or species variant thereof.

58. The method of claim 56, wherein the target substrate is C2 or C3.

59. The method of claim 56, wherein the modification(s) in an MT-SP1 protease or a catalytically active portion thereof comprises a modification in position 224, based on chymotrypsin numbering.

60. The method of claim 58, wherein the modification(s) in an MT-SP1 protease or a catalytically active portion thereof comprises a modification in position 224, based on chymotrypsin numbering.

61. The method of claim 56, wherein the modification(s) in an MT-SP1 protease or a catalytically active portion thereof comprises a modification in position 151, based on chymotrypsin numbering.

62. The method of claim 58, wherein the modification(s) in an MT-SP1 protease or a catalytically active portion thereof comprises a modification in position 151, based on chymotrypsin numbering.

63. The method of claim 51, wherein the modification in an MT-SP1 protease or catalytically active portion thereof is selected from among I41T/Y146D/G151L/K224F, I41T/Y146D/G151L/Q175D/K224F, I41T/Y146D/G151L/Q175D/K224L, I41T/Y146D/G151L/Q175D/K224R, AND I41T/Y146D/G151L/Q175D/K224N, I41T/Y146D/G151L/K224N, Y146D/G151L/K224N, I41T/Y146D/G151L/Q175K/K224F, I41T/Y146D/G151L/Q175R/K224F, I41T/Y146D/G151L/Q175H/K224F, I41T/Y146D/G151L/Q175Y/K224F, I41T/Y146D/G151L/Q175K/K224N, I41T/Y146D/G151L/Q175R/K224N, I41T/Y146D/G151L/Q175H/K224N, and I41T/Y146D/G151L/Q175Y/K224N based on chymotrypsin numbering.

64. The method of claim 56, wherein the modification(s) in an MT-SP1 protease or a catalytically active portion thereof are in any one or more amino acids that contribute to extended substrate specificity or secondary sites of interaction.

65. The method of claim 64, wherein the modification(s) in an MT-SP1 protease or a catalytically active portion thereof correspond to any one or more of amino acid positions 97, 146, 192, and 224 of an MT-SP1 protease, based on chymotrypsin numbering.

66. The method of claim 65, wherein the modification(s) in an MT-SP1 protease or a catalytically active portion thereof correspond to any one or more of amino acids F97, Y146, Q192, and K224 of the MT-SP1 protease, based on chymotrypsin numbering.

67. The method of claim 66, wherein the modification(s) in an MT-SP1 protease or a catalytically active portion thereof are selected from any one or more of F97D, F97E, F97A, F97W, Y146N, Y146D, Y146E, Y146A, Y146W, Y146R, Q192R, Q192V, K224A, and K224F.

68. The method of claim 56, wherein the modification(s) in an MT-SP1 protease or a catalytically active portion thereof corresponds to a modified MT-SP1 polypeptide having a sequence of amino acids as set forth in any of SEQ ID NOS: 12, 14, 16, 18, 20, 22, 24, 26, 28, 30, 32, 34, 36, 38, 40-69, 404-418, 419-447, 524-533, 552-659, or 663-710.

69. The method of claim 67, wherein the modification(s) in an MT-SP1 protease or a catalytically active portion thereof are Y146D/K224F or Y146E.

70. The method of claim 68, wherein the modification(s) in an MT-SP1 protease or a catalytically active portion thereof correspond to a modified MT-SP1 polypeptide having a sequence of amino acids as set forth in SEQ ID NO:596 or 650.

71. The method of claim 56, wherein the modification(s) in an MT-SP1 protease or a catalytically active portion thereof are selected from among F97N, F97D, F97E, F99Y, F99V, F99W, D217A, D217V, F97A, F97W, F99A, Y146N, Y146D, Y146E, Y146A, Y146W, Y146R, W215F, W215Y, Q192V, Q192R, Q192F, K224A, K224F, M180E, Y146D/K224F, D96A, Y146E/K224N, I41T/Y146E/Q175D/K224R, I41T/Y146D/K224F, I41T/Y146E/Q175D/K224N, I41T/Y146E/G151L/Q175D/K224L, Y146E/Q221aE/K224F, I41T/Y146E/G151L/Q175D/K224R, I41T/Y146E/G151L/Q175D/K224N, Q221aD, Y146E/K224R, Y146E/Q175D/K224N, Y146D/K224R, I41T/Y146E/G151L/Q175D/K224F, Y146E/Q175D/K224R, Y146E/L224L, G147E, Y146D/Q175D/K224R, Y146D/Q175L/K224L, Y146D/Q175L/K224L, Y146D/Q175W/K224L, Y146D/K224L, Y146E/Q221aE/K224R, Y146E/K224A, Y146D/Q175H/K224L, Y146D/Q175Y/K224L, Y146E/K224Y, Y146D/Q175F/K224L, Y146D/Q175F/K225L, Y146D/Q221aL/K224S, I41E/Y146D/K224L, Y146D/D217F/K224L, Y146D/D217F/K224L, H143V/Y146D/K224F, Y146E/K224F, Y146A/K224F, Y146E/K224T, I41T/Y146E/K224L, I41F/Y146D/K224F, I41L/Y146D/K224F, I41T/Y146D/G151L/K224F, I41A/Y146D/K224F, I41E/Y146D/K224F, I41D/Y146D/K224L, I41D/Y146D/K224F, Y146N/K224F, I41T/Y146D/Q175D/K224F, Q192F/K224F, Y146D/Q192A/K224F, Q192V/K224F, I41T/Y146D/Q175D/K224L, I41T/Y146D/Q175D/K224R, I41T/Y146D/Q175D/K224N, I41T/Y146D/G151L/Q175D/K224F, I41T/Y146D/G151L/Q175D/K224L, I41T/Y146D/G151L/Q175D/K224R, I41T/Y146D/G151L/Q175D/K224N, I41T/Y146E/Q175D/K224F, I41T/Y146E/Q175D/K224L, I41T/Y146D/G151L/K224N, Y146D/Q175D/K224N, Y146D/Q175D/K224N, Y146D/G151L/K224N, Y146D/Q175R/K224N, Y146D/Q175K/K224N, Y146D/Q175H/K224N, I41T/Y146D/G151L/Q175K/K224F, I41T/Y146D/G151L/Q175R/K224F, I41T/Y146D/G151L/Q175H/K224F, I41T/Y146D/G151L/Q175Y/K224F, I41T/Y146D/G151L/Q175K/K224N, I41T/Y146D/G151L/Q175R/K224N, I41T/Y146D/G151L/Q175H/K224N, and I41T/Y146D/G151L/Q175Y/K224N, based on chymotrypsin numbering.

72. The method of claim 71, wherein the MT-SP1 protease cleaves a substrate recognition site of the target substrate.

73. The method of claim 72, wherein the target substrate is C2 or C3.

74. The method of claim 73, wherein the target substrate is C2 and the substrate recognition site includes a sequence of amino acids of SLGR (SEQ ID NO:392).

75. The method of claim 37, wherein the non-complement protease cleaves a substrate recognition site of the target substrate.

76. The method of claim 75, wherein the non-complement protease cleaves a Factor I substrate recognition site.

77. The method of claim 37, wherein the non-complement protease or a catalytically active portion thereof is administered in combination with a second agent for treating a complement-mediated disorder.

78. The method of claim 77, wherein the second agent is an anti-inflammatory agent or an anticoagulant.

79. The method of claim 78, wherein the second agent is selected from among any one or more of a NSAID, antimetabolite, corticosteroid, analgesic, cytotoxic agent, pro-inflammatory cytokine inhibitor, anti-inflammatory cytokines, B cell targeting agents, compounds targeting T antigens, adhesion molecule blockers, chemokines receptor antagonists, kinase inhibitors, PPAR-γ ligands, complement inhibitors, heparin, warfarin, acenocoumarol, phenindione, EDTA, citrate, oxalate, argatroban, lepirudin, bivalirudin, and ximelagatran.

80. A combination, comprising:
(a) a non-complement protease that cleaves any one or more complement target substrates of a complement pathway such that complement activation in a pathway comprising the target substrate is altered; and
(b) a second agent or agents for treating a complement-mediated disorder.

81. The combination of claim 80, wherein the second agent or agents is an anti-inflammatory agent(s) or anticoagulant(s).

82. The combination of claim 81 wherein, the anti-inflammatory agent(s) is selected from among any one or more of a NSAID, antimetabolite, corticosteroid, analgesic, cytotoxic agent, pro-inflammatory cytokine inhibitor, anti-inflammatory cytokines, B cell targeting agents, compounds targeting T antigens, adhesion molecule blockers, chemokines receptor antagonists, kinase inhibitors, PPAR-γ ligands, complement inhibitors, heparin, warfarin, acenocoumarol, phenindione, EDTA, citrate, oxalate, argatroban, lepirudin, bivalirudin, and ximelagatran.

83. The combination of claim 80, wherein complement activation is inhibited.

84. A modified non-complement protease, comprising modifications in any one or more amino acids of a scaffold protease, wherein:
the modified amino acid residue(s) increases one or both of specificity for a target substrate or activity towards a target substrate, wherein the target substrate is a complement protein.

85. The modified non-complement protease of claim 84, wherein the target substrate is any one or more of C1q, C2, C3, iC3, C4, iC4, C5, C6, C7, C8, C9, MBL, Factor B, Factor D, Factor P, MASP-1, MASP-2, C1r, C1s, C4b, C4a, C2b, C2a, C3b, C3a, Ba, or Bb.

86. The modified non-complement protease of claim 84, wherein the target substrate comprises a sequence of amino acids set forth in any one SEQ ID NOS: 298, 299, 300, 302, 304, 305, 306, 311, 312, 313, 314, 315, 316, 317, 318, 319, 320, 321, 322, 326, 328, 330, 332, 334, 335, 338, 340, and 344, or comprises a fragment thereof that exhibits a complement activity.

87. The modified non-complement protease of claim 84, wherein the target substrate is a ficolin.

88. The modified non-complement protease of claim 87, wherein the target substrate comprises a sequence of amino acids set forth in any of SEQ ID NOS:660-662.

89. The modified non-complement protease of claim 84, wherein the scaffold protease is selected from among a serine protease, cysteine protease, aspartic protease, threonine protease, and metallo-protease.

90. The modified non-complement protease of claim 89, wherein the scaffold protease is selected from among granzyme B, granzyme A, granzyme M, cathepsin G, MT-SP1, neutrophil elastase, chymase, alpha-tryptase, beta-trypsase I or II, chymotrypsin, collagenase, factor XII, factor XI, factor CII, factor X, thrombin, protein C, u-plasminogen activator (u-PA), t-plasminogen activator (t-PA), plasmin, plasma kallikrein, chymotrypsin, trypsin, a cathepsin, papain, cruzain, a metalloprotease and allelic variations, isoforms and catalytically active portions thereof.

91. The modified non-complement protease of claim 90, wherein the scaffold protease comprises a sequence of amino acids as set forth in any one of SEQ ID NOS: 2, 4, 8, 77, 79, 83, 85, 87, 89, 93, 99, 117, 119, 121, 123, 132, 134, 138, 142, 144, 146, 148, 162, 166, 168, 170, 172, 174, 176, 178, 180, 182, 190, 192, 194, 196, 198, 200, 202, 204, 206, 208, 218, 220, 222, 224, 226, 238, 248, 250, 260, 262, 280, 282, 373, 375, 377, 379, 381, 383, 385, 387, 547, 549, and 551 and catalytically active portions thereof.

92. The modified non-complement protease of claim 90, wherein the scaffold protease is an MT-SP1 protease.

93. The modified non-complement protease of claim 92, wherein the MT-SP1 protease or a catalytically active portion thereof comprises a sequence of amino acids set forth in SEQ ID NO: 2 or 10.

94. The modified non-complement protease of claims 92, wherein the target substrate is C2 or C3.

95. The modified non-complement protease of claim 92, comprising at least two or more modifications, wherein one modification is at position 146 and the second modification is at position 224, based on chymotrypsin numbering, provided that:
(i) where the protease includes only two modifications, the protease does not include Y146D and K224F as the two modification; and
(ii) where the protease contains three modifications, the protease does not include F99V or I or L or T with Y146D and K224F.

96. The modified non-complement protease of claim 94, comprising at least two or more modifications, wherein one modification is a position 146 and the second is at position 224, based on chymotrypsin numbering, provided that:
(i) where the protease includes only two modifications, the protease does not include Y146D and K224F as the two modification; and
(ii) where the protease contains three modifications, the protease does not include F99V or I or L or T with Y146D and K224F.

97. The modified non-complement protease of claim 92, comprising at least one modification at position 151, based on chymotrypsin numbering.

98. The modified non-complement protease of claim 94, comprising at least one modification at position 151, based on chymotrypsin numbering.

99. The modified non-complement protease of claim 97, wherein modification(s) in an MT-SP1 or catalytically active portion are selected from among I41T/Y146D/G151L/K224F, I41T/Y146D/G151L/Q175D/K224F, I41T/Y146D/G151L/Q175D/K224L, I41T/Y146D/G151L/Q175D/K224R, AND I41T/Y146D/G151L/Q175D/K224N, I41T/Y146D/G151L/K224N, Y146D/G151L/K224N, I41T/Y146D/G151L/Q175K/K224F, I41T/Y146D/G151L/Q175R/K224F, I41T/Y146D/G151L/Q175H/K224F, I41T/Y146D/G151L/Q175Y/K224F, I41T/Y146D/G151L/Q175K/K224N, I41T/Y146D/G151L/Q175R/K224N, I41T/Y146D/G151L/Q175H/K224N, and I41T/Y146D/G151L/Q175Y/K224N based on chymotrypsin numbering.

100. The modified non-complement protease of claim 99, wherein modification(s) in an MT-SP1 or catalytically active portion correspond to modification of I41T/I46D/G151L/K224F, based on chymotrypsin numbering.

101. The modified non-complement protease of claim 92, wherein modification(s) in an MT-SP1 protease or a catalytically active portion thereof are selected from any one or more of D96A, D96V, D96F, D96F, D96S, D96T, F99S, F99G, Q174H, Q174A, Q174V, Q174F, Q174R, Q174K, Q174L, Q174Y, Q192L, Q192I, Q192E, Q192K, Q192Y, D217Q, D217N, D217H, K224A, based on chymotrypsin numbering.

102. The modified non-complement protease of claim 92, wherein modification(s) in an MT-SP1 protease or a catalytically active portion thereof are selected from among Y146E/K224N, I41T/Y146E/Q175D/K224R, I41T/Y146D/K224F, I41T/Y146E/Q175D/K224N, I41T/Y146E/G151L/Q175D/K224L, Y146E/Q221aE/K224F, I41T/Y146E/G151L/Q175D/K224R, I41T/Y146E/G151L/Q175D/K224N, Q221aD, Y146E/K224R, Y146E/Q175D/K224N, Y146D/K224R, I41T/Y146E/G151L/Q175D/K224F, Y146E/Q175D/K224R, Y146E/L224L, G147E, Y146D/Q175D/K224R, Y146D/Q175L/K224L, Y146D/Q175L/K224L, Y146D/Q175W/K224L, Y146D/K224L, Y146E/Q221aE/K224R, Y146E/K224A, Y146D/Q175H/K224L, Y146D/Q175Y/K224L, Y146E/K224Y, Y146D/Q175F/K224L, Y146D/Q175F/K225L, Y146D/Q221aL/K224S, I41E/Y146D/K224L, Y146D/D217F/K224L, Y146D/D217F/K224L, H143V/Y146D/K224F, Y146E/K224F, Y146A/K224F, Y146E/K224T, I41T/Y146E/K224L, I41F/Y146D/K224F, I41L/Y146D/K224F, I41T/Y146D/G151L/K224F, I41A/Y146D/K224F, I41E/Y146D/K224F, I41D/Y146D/K224L, I41D/Y146D/K224F, Y146N/K224F, I41T/Y146D/Q175D/K224F, Q192F/K224F, Y146D/Q192A/K224F, Q192V/K224F, I41T/Y146D/Q175D/K224L, I41T/Y146D/Q175D/K224R, I41T/Y146D/Q175D/K224N, I41T/Y146D/G151L/Q175D/K224F, I41T/Y146D/G151L/Q175D/K224L, I41T/Y146D/G151L/Q175D/K224R, I41T/Y146D/G151L/Q175D/K224N, I41T/Y146E/Q175D/K224F, and I41T/Y146E/Q175D/K224L, I41T/Y146D/G151L/K224N, Y146D/Q175D/K224N, Y146D/Q175D/K224N, Y146D/G151L/K224N, Y146D/Q175R/K224N, Y146D/Q175K/K224N, Y146D/Q175H/K224N, I41T/Y146D/G151L/Q175K/K224F, I41T/Y146D/G151L/Q175R/K224F, I41T/Y146D/G151L/Q175H/K224F, I41T/Y146D/G151L/Q175Y/K224F, I41T/Y146D/G151L/Q175K/K224N, I41T/Y146D/G151L/Q175R/K224N, I41T/Y146D/G151L/Q175H/K224N, and I41T/Y146D/G151L/Q175Y/K224N, based on chymotrypsin numbering.

103. The modified non-complement protease of claim 92, wherein the modification(s) in an MT-SP1 protease or a catalytically active portion thereof correspond to a modified MT-SP1 polypeptide having a sequence of amino acids as set forth in any one of SEQ ID NOS: 41-51, 56, 57, 60-64, 67, 69, 419-429, 431, 434, 435, 438-442, 445, 524, 525, 527-530, 532, 533, 552-659, or 663-710.

104. The modified non-complement protease of claim 92, wherein the modification(s) in an MT-SP1 protease or a catalytically active portion thereof correspond to a modified MT-SP1 polypeptide having a sequence of amino acids as set forth in any one of SEQ ID NOS: 596 or 650.

105. The modified non-complement protease of claim 103, wherein the MT-SP1 protease cleaves a substrate recognition site of the target substrate.

106. The modified non-complement protease of claim 105, wherein the target substrate is C2 or C3.

107. The modified non-complement protease of claim 106, wherein the target substrate is C2 and the substrate recognition site includes a sequence of amino acids of SLGR (SEQ ID NO:392).

108. A pharmaceutical composition, comprising a modified non-complement protease of claim 84.

109. A combination, comprising:
(a) a pharmaceutical composition of claim 108; and
(b) a second agent or agents for treating a complement-mediated disorder.

110. The pharmaceutical composition of claim 108, further comprising a pharmaceutically acceptable excipient.

111. The pharmaceutical composition of 110, wherein the pharmaceutical composition is formulated for systemic, oral, nasal, pulmonary, local, or topical administration.

112. A kit, comprising the pharmaceutical composition of claim 108, a device for administration of the composition and, optionally, instructions for administration.

113. A nucleic acid molecule, comprising a sequence of nucleotides that encodes any one of the modified non-complement proteases of claim 84.

114. A vector, comprising the nucleic acid molecule of claim 113.

115. A cell, comprising the vector of claim 114.

116. A method of treatment, comprising administering to a subject a nucleic acid molecule of claim 113.

117. The method of treatment of claim 116, wherein the nucleic acid molecule is introduced into a vector for administration.

118. The method of treatment of claim 117, wherein the vector is an expression vector.

119. The method of treatment of claim 118, wherein the vector is episomal.

120. The method of treatment of claim 117, wherein the expression vector is selected from among an adenovirus vector, an adeno-associated virus vector, EBV, SV40, cytomegalovirus vector, vaccinia virus vector, herpesvirus vector, a retrovirus vector, a lentivirus vector, or an artificial chromosome.

121. The method of treatment of claims 117, wherein the nucleic acid is administered in vivo or ex vivo.

122. The method of treatment of claim 121, wherein ex vivo treatment comprises administering the nucleic acid into a cell in vitro, followed by administration of the cell into the subject.

123. The method of treatment of claim 122, wherein the cell is from a suitable donor or from the subject to be treated.

124. The method of treatment of claim 116, wherein the subject is a human.

125. A fusion protein, comprising a catalytically active portion of a protease of claim 84 that is fused to a non-protease polypeptide.

126. The method of claim 16, wherein the modification(s) in an MT-SP1 protease or a catalytically active portion thereof are selected from a protease having a modification in position 41, based on chymotrypsin numbering.

127. The method of claim 18, wherein the modification(s) in an MT-SP1 protease or a catalytically active portion thereof are selected from a protease having a modification in position 41, based on chymotrypsin numbering.

128. The method of claim 56, wherein the modification(s) in an MT-SP1 protease or a catalytically active portion thereof comprises a modification in position 41, based on chymotrypsin numbering.

129. The method of claim 58, wherein the modification(s) in an MT-SP1 protease or a catalytically active portion thereof comprises a modification in position 41, based on chymotrypsin numbering.

130. The modified non-complement protease of claim 92, comprising at least one modification at position 41, based on chymotrypsin numbering.

131. The modified non-complement protease of claim 94, comprising at least one modification at position 41, based on chymotrypsin numbering.

The application's sequence listing, which the Patent Office published only in electronic form, follows.

SEQUENCE LISTING (710 sequences)

SEQ ID NO: 1 - DNA, 3149 bp, Homo sapiens
gacgcctgtgagacccgcgagcggcctcggggaccatggggagcgatcgggcccgcaagggcggagggggcccgaaggacttcggcgcgggactcaagtacaactcccggcacgagaaagtgaatggcttggaggaaggcgtggagttcctgccagtcaacaacgtcaagaaggtggaaaagcatggcccggggcgctgggtggtgctggcagccgtgctgatcggcctcctcttggtcttgctggggatcggcttcctggtgtggcatttgcagtaccgggacgtgcgtgtccagaaggtcttcaatggctacatgaggatcacaaatgagaattttgtggatgcctacgagaactccaactccactgagtttgtaagcctggccagcaaggtgaaggacgcgctgaagctgctgtacagcggagtcccattcctgggcccctaccacaaggagtcggctgtgacggccttcagcgagggcagcgtcatcgcctactactggtctgagttcagcatcccgcagcacctggtggaggaggccgagcgcgtcatggccgaggagcgcgtagtcatgctgcccccgcgggcgcgctccctgaagtcctttgtggtcacctcagtggtggctttccccacggactccaaaacagtacagaggacccaggacaacagctgcagctttggcctgcacgcccgcggtgtggagctgatgcgcttcaccacgcccggcttccctgacagcccctaccccgctcatgcccgctgccagtgggccctgcggggggacgccgactcagtgctgagcctcaccttccgcagctttgaccttgcgtcctgcgacgagcgcggcagcgacctggtgacggtgtacaacaccctgagccccatggagccccacgccctggtgcagttgtgtggcacctaccctccctcctacaacctgaccttccactcctcccagaacgtcctgctcatcacactgataaccaacactgagcggcggcatcccggctttgaggccaccttcttccagctgcctaggatgagcagctgtggaggccgcttacgtaaagcccaggggacattcaacagcccctactacccaggccactacccacccaacattgactgcacatggaacattgaggtgcccaacaaccagcatgtgaaggtgcgcttcaaattcttctacctgctggagcccggcgtgcctgcgggcacctgccccaaggactacgtggagatcaatggggagaaatactgcggagagaggtcccagttcgtcgtcaccagcaacagcaacaagatcacagttcgcttccactcagatcagtcctacaccgacaccggcttcttagctgaatacctctcctacgactccagtgacccatgcccggggcagttcacgtgccgcacggggcggtgtatccggaaggagctgcgctgtgatggctgggccgactgcaccgaccacagcgatgagctcaactgcagttgcgacgccggccaccagttcacgtgcaagaacaagttctgcaagcccctcttctgggtctgcgacagtgtgaacgactgcggagacaacagcgacgagcaggggtgcagttgtccggcccagaccttcaggtgttccaatgggaagtgcctctcgaaaagccagcagtgcaatgggaaggacgactgtggggacgggtccgacgaggcctcctgccccaaggtgaacgtcgtcacttgtaccaaacacacctaccgctgcctcaatgggctctgcttgagcaagggcaaccctgagtgtgacgggaaggaggactgtagcgacggctcagatgagaaggactgcgactgtgggctgcggtcattcacgagacaggctcgtgttgttgggggcacggatgcggatgagggcgagtggccctggcaggtaagcctgcatgctctgggccagggccacatctgcggtgcttccctcatctctcccaactggctggtctctgccgcacactgctacatcgatgacagaggattcaggtactcagaccccacgcagtggacggccttcctgggcttgcacgaccagagccagcgcagcgcccctggggtgcaggagcgcaggctcaagcgcatcatctcccaccccttcttcaatgacttcaccttcgactatgacatcgcgctgctggagctggagaaaccggcagagtacagctccatggtgcggcccatctgcctgccggacgcctcccatgtcttccctgccggcaaggccatctgggtcacgggctggggacacacccagtatggaggcactggcgcgctgatcctgcaaaagggtgagatccgcgtcatcaaccagaccacctgcgagaacctcctgccgcagcagatcacgccgcgcatgatgtgcgtgggcttcctcagcggcggcgtggactcctgccagggtgattccgggggacccctgtccagcgtggaggcggatgggcggatcttccaggccggtgtggtgagctggggagacggctgcgctcagaggaacaagccaggcgtgtacacaaggctccctctgtttcgggactggatcaaagagaacactggggtataggggccggggccacccaaatgtgtacacctgcggggccacccatcgtccaccccagtgtgcacgcctgcaggctggagactggaccgctgactgcaccagcgcccccagaacatacactgtgaactcaatctccagggctccaaatctgcctagaaaacctctcgcttcctcagcctccaaagtggagctgggaggtagaaggggaggacactggtggttctactgacccaactgggggcaaaggtttgaagacacagcctcccccgccagccccaagctgggccgaggcgcgtttgtgtatatctgcctcccctgtctgtaaggagcagcgggaacggagcttcggagcctcctcagtgaaggtggtggggctgccggatctgggctgtggggcccttgggccacgctcttgaggaagcccaggctcggaggaccctggaaaacagacgggtctgagactgaaaatggtttaccagctcccaggtgacttcagtgtgtgtattgtgtaaatgagtaaaacattttatttctttttaaaaaaaaaaa

SEQ ID NO: 2 - protein, 855 aa, Homo sapiens [sequence omitted]

SEQ ID NO: 3 - DNA, 934 bp, Homo sapiens
tgagaagatgcaaccaatcctgcttctgctggccttcctcctgctgcccagggcagatgcaggggagatcatcgggggacatgaggccaagccccactcccgcccctacatggcttatcttatgatctgggatcagaagtctctgaagaggtgcggtggcttcctgatacaagacgacttcgtgctgacagctgctcactgttggggaagctccataaatgtcaccttgggggcccacaatatcaaagaacaggagccgacccagcagtttatccctgtgaaaagacccatcccccatccagcctataatcctaagaacttctccaacgacatcatgctactgcagctggagagaaaggccaagcggaccagagctgtgcagcccctcaggctacctagcaacaaggcccaggtgaagccagggcagacatgcagtgtggccggctgggggcagacggcccccctgggaaaacactcacacacactacaagaggtgaagatgacagtgcaggaagatcgaaagtgcgaatctgacttacgccattattacgacagtaccattgagttgtgcgtgggggacccagagattaaaaagacttcctttaagggggactctggaggccctcttgtgtgtaacaaggtggcccagggcattgtctcctatggacgaaacaatggcatgcctccacgagcctgcaccaaagtctcaagctttgtacactggataaagaaaaccatgaaacgctactaactacaggaagcaaactaagcccccgctgtaatgaaacaccttctctggagccaagtccagatttacactgggagaggtgccagcaactgaataaatacctctcccagtgtaaatctggagccaagtccagatttacactgggagaggtgccagcaactgaataaatacctcttagctgagtgg

SEQ ID NO: 4 - protein, 247 aa, Homo sapiens
MQPILLLLAFLLLPRADAGEIIGGHEAKPHSRPYMAYLMIWDQKSLKRCGGFLIQDDFVLTAAHCWGSSINVTLGAHNIKEQEPTQQFIPVKRPIPHPAYNPKNFSNDIMLLQLERKAKRTRAVQPLRLPSNKAQVKPGQTCSVAGWGQTAPLGKHSHTLQEVKMTVQEDRKCESDLRHYYDSTIELCVGDPEIKKTSFKGDSGGPLVCNKVAQGIVSYGRNNGMPPRACTKVSSFVHWIKKTMKRY

SEQ ID NO: 5 - DNA, 1113 bp, Rattus norvegicus
cataagatgtatgtgtagggggtgtaagagtactcgtgaggggtgtgggcagtgttatagggtgctggtgagcaaaccctctgggacctaggtggccttccagggaagatgaagctcctcttgctcctgctgagcttctctctggcccccaagacagaggcaggggagatcatcgggggacatgaagccaagccccactctcgaccctacatggcctatcttcagatcatggatgagtattctgggagtaagaagtgtggcggcttccttatacgagaagactttgtgctgactgctgctcactgttcgggaagcaaaataaatgtcacgttgggggcccacaacatcaaagaacaggagaagatgcaacaaatcatccctgtggtgaaaatcattccccacccagcgtataattctaagacaatctccaatgacatcatgctgttaaagctgaagagtaaggccaagaggtctagcgctgtgaagcctctcaatctgcccagacgcaacgtcaaagtgaaaccaggagatgtgtgctatgtggctggttggggaaagctgggcccaatgggcaaatactcagacacactacaagaggttgagctaacagtacaggaggatcagaagtgtgagtcctacttaaaaaattatttcgacaaagccaatgagatatgtgcaggggacccaaagatcaaacgtgcttcctttcggggggactctggagggcctcttgtgtgtaaaaaagtggccgcgggcatcgtctcctatggacaaaatgatggttcaactccacgggcattcaccaaagtctcgactttcctatcatggataaagaaaactatgaaaaagagctaactacaagaagcaacatggatcatttcctgactaaccatctgccctatagctgagtccaggattgctctaggacagatggcagcaactgaataaagcactttttttctgagactggttgactggtttcatgtccattcacagtgatcaaccctgtccttggcagatgaatggaatgcttctgccacaaggctgtgacaacccagctgacatctgctagttcaccctctctacaagagaagaagaatgtttgattgtccg

SEQ ID NO: 6 - protein, 248 aa, Rattus norvegicus
MKLLLLLLSFSLAPKTEAGEIIGGHEAKPHSRPYMAYLQIMDEYSGSKKCGGFLIREDFVLTAAHCSGSKINVTLGAHNIKEQEKMQQIIPVVKIIPHPAYNSKTISNDIMLLKLKSKAKRSSAVKPLNLPRRNVKVKPGDVCYVAGWGKLGPMGKYSDTLQEVELTVQEDQKCESYLKNYFDKANEICAGDPKIKRASFRGDSGGPLVCKKVAAGIVSYGQNDGSTPRAFTKVSTFLSWIKKTMKKS

SEQ ID NO: 7 - DNA, 865 bp, Homo sapiens
ccctgccagcggcaccatggctttcctctggctcctctcctgctgggccctcctgggtaccaccttcggctgcggggtccccgccatccaccctgtgctcagcggcctgtccaggatcgtgaatggggaggacgccgtccccggctcctggccctggcaggtgtccctgcaggacaaaaccggcttccacttctgcgggggctccctcatcagcgaggactgggtggtcaccgctgcccactgcggggtcaggacctccgacgtggtcgtggctggggagtttgaccagggctctgacgaggagaacatccaggtcctgaagatcgccaaggtcttcaagaaccccaagttcagcattctgaccgtgaacaatgacatcaccctgctgaagctggccacacctgcccgcttctcccagacagtgtccgccgtgtgcctgcccagcgccgacgacgacttccccgcggggacactgtgtgccaccacaggctggggcaagaccaagtacaacgccaacaagacccctgacaagctgcagcaggcagccctgcccctcctgtccaatgccgaatgcaagaagtcctggggcaggaggatcaccgacgtgatgatctgtgccggggccagtggcgtctcctcctgcatgggcgactctggcggtcccctggtctgccaaaaggatggagcctggaccctggtgggcattgtgtcctggggcagcgacacctgctccacctccagccctggcgtgtacgcccgtgtcaccaagctcataccttgggtgcagaagatcctggctgccaactgagcccgcggctccctccgaccctgctccccacagagcctcagtaaacccatggaacac

SEQ ID NO: 8 - protein, 263 aa, Homo sapiens
MAFLWLLSCWALLGTTFGCGVPAIHPVLSGLSRIVNGEDAVPGSWPWQVSLQDKTGFHFCGGSLISEDWVVTAAHCGVRTSDVVVAGEFDQGSDEENIQVLKIAKVFKNPKFSILTVNNDITLLKLATPARFSQTVSAVCLPSADDDFPAGTLCATTGWGKTKYNANKTPDKLQQAALPLLSNAECKKSWGRRITDVMICAGASGVSSCMGDSGGPLVCQKDGAWTLVGIVSWGSDTCSTSSPGVYARVTKLIPWVQKILAAN

SEQ ID NO: 9 - DNA, 723 bp, Homo sapiens
gttgttgggggcacggatgcggatgagggcgagtggccctggcaggtaagcctgcatgctctgggccagggccacatctgcggtgcttccctcatctctcccaactggctggtctctgccgcacactgctacatcgatgacagaggattcaggtactcagaccccacgcagtggacggccttcctgggcttgcacgaccagagccagcgcagcgcccctggggtgcaggagcgcaggctcaagcgcatcatctcccaccccttcttcaatgacttcaccttcgactatgacatcgcgctgctggagctggagaaaccggcagagtacagctccatggtgcggcccatctgcctgccggacgcctcccatgtcttccctgccggcaaggccatctgggtcacgggctggggacacacccagtatggaggcactggcgcgctgatcctgcaaaagggtgagatccgcgtcatcaaccagaccacctgcgagaacctcctgccgcagcagatcacgccgcgcatgatgtgcgtgggcttcctcagcggcggcgtggactcctgccagggtgattccgggggacccctgtccagcgtggaggcggatgggcggatcttccaggccggtgtggtgagctggggagacggctgcgctcagaggaacaagccaggcgtgtacacaaggctccctctgtttcgggactggatcaaagagaacactggggta

SEQ ID NO: 10 - protein, 241 aa, Homo sapiens [sequence omitted]

SEQ ID NO: 11 - DNA, 723 bp, Homo sapiens
gttgttgggggcacggatgcggatgagggcgagtggccctggcaggtaagcctgcatgctctgggccagggccacatctgcggtgcttccctcatctctcccaactggctggtctctgccgcacactgctacatcgatgacagaggattcaggtactcagaccccacgcagtggacggccttcctgggcttgcacgaccagagccagcgcagcgcccctggggtgcaggagcgcaggctcaagcgcatcatctcccaccccttcttcaatgacttcaccttcgactatgacatcgcgctgctggagctggagaaaccggcagagtacagctccatggtgcggcccatctgcctgccggacgcctcccatgtcttccctgccggcaaggccatctgggtcacgggctggggacacacccaggacggaggcactggcgcgctgatcctgcaaaagggtgagatccgcgtcatcaaccagaccacctgcgagaacctcctgccgcagcagatcacgccgcgcatgatgtgcgtgggcttcctcagcggcggcgtggactcctgccagggtgattccgggggacccctgtccagcgtggaggcggatgggcggatcttccaggccggtgtggtgagctggggagacggctgcgctcagaggaacttcccaggcgtgtacacaaggctccctctgtttcgggactggatcaaagagaacactggggta

SEQ ID NO: 12 - protein, 241 aa, Homo sapiens
VVGGTDADEGEWPWQVSLHALGQGHICGASLISPNWLVSAAHCYIDDRGFRYSDPTQWTAFLGLHDQSQRSAPGVQERRLKRIISHPFFNDFTFDYDIALLELEKPAEYSSMVRPICLPDASHVFPAGKAIWVTGWGHTQDGGTGALILQKGEIRVINQTTCENLLPQQITPRMMCVGFLSGGVDSCQGDSGGPLSSVEADGRIFQAGVVSWGDGCAQRNFPGVYTRLPLFRDWIKENTGV

SEQ ID NO: 13 - DNA, 723 bp, Homo sapiens
gttgttgggggcacggatgcggatgagggcgagtggccctggcaggtaagcctgcatgctctgggccagggccacatctgcggtgcttccctcatctctcccaactggctggtctctgccgcacactgctacatcgatgacagaggattcaggtactcagaccccacgcagtggacggccttcctgggcttgcacgaccagagccagcgcagcgcccctggggtgcaggagcgcaggctcaagcgcatcatctcccaccccttcttcaatgacttcaccttcgactatgacatcgcgctgctggagctggagaaaccggcagagtacagctccatggtgcggcccatctgcctgccggacgcctcccatgtcttccctgccggcaaggccatctgggtcacgggctggggacacacccagtatggaggcactggcgcgctgatcctgcaaaagggtgagatccgcgtcatcaaccagaccacctgcgagaacctcctgccgcagcagatcacgccgcgcatgatgtgcgtgggcttcctcagcggcggcgtggactcctgcgtcggtgattccgggggacccctgtccagcgtggaggcggatgggcggatcttccaggccggtgtggtgagctggggagacggctgcgctcagaggaacaagccaggcgtgtacacaaggctccctctgtttcgggactggatcaaagagaacactggggta

SEQ ID NO: 14 - protein, 241 aa, Homo sapiens
VVGGTDADEGEWPWQVSLHALGQGHICGASLISPNWLVSAAHCYIDDRGFRYSDPTQWTAFLGLHDQSQRSAPGVQERRLKRIISHPFFNDFTFDYDIALLELEKPAEYSSMVRPICLPDASHVFPAGKAIWVTGWGHTQYGGTGALILQKGEIRVINQTTCENLLPQQITPRMMCVGFLSGGVDSCVGDSGGPLSSVEADGRIFQAGVVSWGDGCAQRNKPGVYTRLPLFRDWIKENTGV

SEQ ID NO: 15 - DNA, 723 bp, Homo sapiens
gttgttgggggcacggatgcggatgagggcgagtggccctggcaggtaagcctgcatgctctgggccagggccacatctgcggtgcttccctcatctctcccaactggctggtctctgccgcacactgctacatcgatgacagaggattcaggtactcagaccccacgcagtggacggccttcctgggcttgcacgaccagagccagcgcagcgcccctggggtgcaggagcgcaggctcaagcgcatcatctcccaccccttcttcaatgacgacaccttcgactatgacatcgcgctgctggagctggagaaaccggcagagtacagctccatggtgcggcccatctgcctgccggacgcctcccatgtcttccctgccggcaaggccatctgggtcacgggctggggacacacccagtatggaggcactggcgcgctgatcctgcaaaagggtgagatccgcgtcatcaaccagaccacctgcgagaacctcctgccgcagcagatcacgccgcgcatgatgtgcgtgggcttcctcagcggcggcgtggactcctgccagggtgattccgggggacccctgtccagcgtggaggcggatgggcggatcttccaggccggtgtggtgagctggggagacggctgcgctcagaggaacaagccaggcgtgtacacaaggctccctctgtttcgggactggatcaaagagaacactggggta

SEQ ID NO: 16 - protein, 241 aa, Homo sapiens
VVGGTDADEGEWPWQVSLHALGQGHICGASLISPNWLVSAAHCYIDDRGFRYSDPTQWTAFLGLHDQSQRSAPGVQERRLKRIISHPFFNDDTFDYDIALLELEKPAEYSSMVRPICLPDASHVFPAGKAIWVTGWGHTQYGGTGALILQKGEIRVINQTTCENLLPQQITPRMMCVGFLSGGVDSCQGDSGGPLSSVEADGRIFQAGVVSWGDGCAQRNKPGVYTRLPLFRDWIKENTGV

SEQ ID NO: 17 - DNA, 723 bp, Homo sapiens
gttgttgggggcacggatgcggatgagggcgagtggccctggcaggtaagcctgcatgctctgggccagggccacatctgcggtgcttccctcatctctcccaactggctggtctctgccgcacactgctacatcgatgacagaggattcaggtactcagaccccacgcagtggacggccttcctgggcttgcacgaccagagccagcgcagcgcccctggggtgcaggagcgcaggctcaagcgcatcatctcccaccccttcttcaatgacgagaccttcgactatgacatcgcgctgctggagctggagaaaccggcagagtacagctccatggtgcggcccatctgcctgccggacgcctcccatgtcttccctgccggcaaggccatctgggtcacgggctggggacacacccagtatggaggcactggcgcgctgatcctgcaaaagggtgagatccgcgtcatcaaccagaccacctgcgagaacctcctgccgcagcagatcacgccgcgcatgatgtgcgtgggcttcctcagcggcggcgtggactcctgccagggtgattccgggggacccctgtccagcgtggaggcggatgggcggatcttccaggccggtgtggtgagctggggagacggctgcgctcagaggaacaagccaggcgtgtacacaaggctccctctgtttcgggactggatcaaagagaacactggggta

SEQ ID NO: 18 - protein, 241 aa, Homo sapiens
VVGGTDADEGEWPWQVSLHALGQGHICGASLISPNWLVSAAHCYIDDRGFRYSDPTQWTAFLGLHDQSQRSAPGVQERRLKRIISHPFFNDETFDYDIALLELEKPAEYSSMVRPICLPDASHVFPAGKAIWVTGWGHTQYGGTGALILQKGEIRVINQTTCENLLPQQITPRMMCVGFLSGGVDSCQGDSGGPLSSVEADGRIFQAGVVSWGDGCAQRNKPGVYTRLPLFRDWIKENTGV

SEQ ID NO: 19 - DNA, 723 bp, Homo sapiens
gttgttgggggcacggatgcggatgagggcgagtggccctggcaggtaagcctgcatgctctgggccagggccacatctgcggtgcttccctcatctctcccaactggctggtctctgccgcacactgctacatcgatgacagaggattcaggtactcagaccccacgcagtggacggccttcctgggcttgcacgaccagagccagcgcagcgcccctggggtgcaggagcgcaggctcaagcgcatcatctcccaccccttcttcaatgacgccaccttcgactatgacatcgcgctgctggagctggagaaaccggcagagtacagctccatggtgcggcccatctgcctgccggacgcctcccatgtcttccctgccggcaaggccatctgggtcacgggctggggacacacccagtatggaggcactggcgcgctgatcctgcaaaagggtgagatccgcgtcatcaaccagaccacctgcgagaacctcctgccgcagcagatcacgccgcgcatgatgtgcgtgggcttcctcagcggcggcgtggactcctgccagggtgattccgggggacccctgtccagcgtggaggcggatgggcggatcttccaggccggtgtggtgagctggggagacggctgcgctcagaggaacaagccaggcgtgtacacaaggctccctctgtttcgggactggatcaaagagaacactggggta

SEQ ID NO: 20 - protein, 241 aa, Homo spaiens
VVGGTDADEGEWPWQVSLHALGQGHICGASLISPNWLVSAAHCYIDDRGFRYSDPTQWTAFLGLHDQSQRSAPGVQERRLKRIISHPFFNDATFDYDIALLELEKPAEYSSMVRPICLPDASHVFPAGKAIWVTGWGHTQYGGTGALILQKGEIRVINQTTCENLLPQQITPRMMCVGFLSGGVDSCQGDSGGPLSSVEADGRIFQAGVVSWGDGCAQRNKPGVYTRLPLFRDWIKENTGV

SEQ ID NO: 21 - DNA, 723 bp, Homo sapiens
gttgttgggggcacggatgcggatgagggcgagtggccctggcaggtaagcctgcatgctctgggccagggccacatctgcggtgcttccctcatctctcccaactggctggtctctgccgcacactgctacatcgatgacagaggattcaggtactcagaccccacgcagtggacggccttcctgggcttgcacgaccagagccagcgcagcgcccctggggtgcaggagcgcaggctcaagcgcatcatctcccaccccttcttcaatgactggaccttcgactatgacatcgcgctgctggagctggagaaaccggcagagtacagctccatggtgcggcccatctgcctgccggacgcctcccatgtcttccctgccggcaaggccatctgggtcacgggctggggacacacccagtatggaggcactggcgcgctgatcctgcaaaagggtgagatccgcgtcatcaaccagaccacctgcgagaacctcctgccgcagcagatcacgccgcgcatgatgtgcgtgggcttcctcagcggcggcgtggactcctgccagggtgattccgggggacccctgtccagcgtggaggcggatgggcggatcttccaggccggtgtggtgagctggggagacggctgcgctcagaggaacaagccaggcgtgtacacaaggctccctctgtttcgggactggatcaaagagaacactggggta

SEQ ID NO: 22 - protein, 241 aa, Homo sapiens
VVGGTDADEGEWPWQVSLHALGQGHICGASLISPNWLVSAAHCYIDDRGFRYSDPTQWTAFLGLHDQSQRSAPGVQERRLKRIISHPFFNDWTFDYDIALLELEKPAEYSSMVRPICLPDASHVFPAGKAIWVTGWGHTQYGGTGALILQKGEIRVINQTTCENLLPQQITPRMMCVGFLSGGVDSCQGDSGGPLSSVEADGRIFQAGVVSWGDGCAQRNKPGVYTRLPLFRDWIKENTGV

SEQ ID NO: 23 - DNA, 723 bp, Homo sapiens
gttgttgggggcacggatgcggatgagggcgagtggccctggcaggtaagcctgcatgctctgggccagggccacatctgcggtgcttccctcatctctcccaactggctggtctctgccgcacactgctacatcgatgacagaggattcaggtactcagaccccacgcagtggacggccttcctgggcttgcacgaccagagccagcgcagcgcccctggggtgcaggagcgcaggctcaagcgcatcatctcccaccccttcttcaatgactggaccttcgactatgacatcgcgctgctggagctggagaaaccggcagagtacagctccatggtgcggcccatctgcctgccggacgcctcccatgtcttccctgccggcaaggccatctgggtcacgggctggggacacacccagaacggaggcactggcgcgctgatcctgcaaaagggtgagatccgcgtcatcaaccagaccacctgcgagaacctcctgccgcagcagatcacgccgcgcatgatgtgcgtgggcttcctcagcggcggcgtggactcctgccagggtgattccgggggacccctgtccagcgtggaggcggatgggcggatcttccaggccggtgtggtgagctggggagacggctgcgctcagaggaacaagccaggcgtgtacacaaggctccctctgtttcgggactggatcaaagagaacactggggta

SEQ ID NO: 24 - protein, 241 aa, Homo sapiens
VVGGTDADEGEWPWQVSLHALGQGHICGASLISPNWLVSAAHCYIDDRGFRYSDPTQWTAFLGLHDQSQRSAPGVQERRLKRIISHPFFNDWTFDYDIALLELEKPAEYSSMVRPICLPDASHVFPAGKAIWVTGWGHTQNGGTGALILQKGEIRVINQTTCENLLPQQITPRMMCVGFLSGGVDSCQGDSGGPLSSVEADGRIFQAGVVSWGDGCAQRNKPGVYTRLPLFRDWIKENTGV

SEQ ID NO: 25 - DNA, 723 bp, Homo sapiens
gttgttgggggcacggatgcggatgagggcgagtggccctggcaggtaagcctgcatgctctgggccagggccacatctgcggtgcttccctcatctctcccaactggctggtctctgccgcacactgctacatcgatgacagaggattcaggtactcagaccccacgcagtggacggccttcctgggcttgcacgaccagagccagcgcagcgcccctggggtgcaggagcgcaggctcaagcgcatcatctcccaccccttcttcaatgactggaccttcgactatgacatcgcgctgctggagctggagaaaccggcagagtacagctccatggtgcggcccatctgcctgccggacgcctcccatgtcttccctgccggcaaggccatctgggtcacgggctggggacacacccaggacggaggcactggcgcgctgatcctgcaaaagggtgagatccgcgtcatcaaccagaccacctgcgagaacctcctgccgcagcagatcacgccgcgcatgatgtgcgtgggcttcctcagcggcggcgtggactcctgccagggtgattccgggggacccctgtccagcgtggaggcggatgggcggatcttccaggccggtgtggtgagctggggagacggctgcgctcagaggaacaagccaggcgtgtacacaaggctccctctgtttcgggactggatcaaagagaacactggggta

SEQ ID NO: 26 - protein, 241 aa, Homo sapiens
VVGGTDADEGEWPWQVSLHALGQGHICGASLISPNWLVSAAHCYIDDRGFRYSDPTQWTAFLGLHDQSQRSAPGVQERRLKRIISHPFFNDWTFDYDIALLELEKPAEYSSMVRPICLPDASHVFPAGKAIWVTGWGHTQDGGTGALILQKGEIRVINQTTCENLLPQQITPRMMCVGFLSGGVDSCQGDSGGPLSSVEADGRIFQAGVVSWGDGCAQRNKPGVYTRLPLFRDWIKENTGV

SEQ ID NO: 27 - DNA, 723 bp, Homo sapiens
gttgttgggggcacggatgcggatgagggcgagtggccctggcaggtaagcctgcatgctctgggccagggccacatctgcggtgcttccctcatctctcccaactggctggtctctgccgcacactgctacatcgatgacagaggattcaggtactcagaccccacgcagtggacggccttcctgggcttgcacgaccagagccagcgcagcgcccctggggtgcaggagcgcaggctcaagcgcatcatctcccaccccttcttcaatgactggaccttcgactatgacatcgcgctgctggagctggagaaaccggcagagtacagctccatggtgcggcccatctgcctgccggacgcctcccatgtcttccctgccggcaaggccatctgggtcacgggctggggacacacccaggagggaggcactggcgcgctgatcctgcaaaagggtgagatccgcgtcatcaaccagaccacctgcgagaacctcctgccgcagcagatcacgccgcgcatgatgtgcgtgggcttcctcagcggcggcgtggactcctgccagggtgattccgggggacccctgtccagcgtggaggcggatgggcggatcttccaggccggtgtggtgagctggggagacggctgcgctcagaggaacaagccaggcgtgtacacaaggctccctctgtttcgggactggatcaaagagaacactggggta

SEQ ID NO: 28 - protein, 241 aa, Homo sapiens
VVGGTDADEGEWPWQVSLHALGQGHICGASLISPNWLVSAAHCYIDDRGFRYSDPTQWTAFLGLHDQSQRSAPGVQERRLKRIISHPFFNDWTFDYDIALLELEKPAEYSSMVRPICLPDASHVFPAGKAIWVTGWGHTQEGGTGALILQKGEIRVINQTTCENLLPQQITPRMMCVGFLSGGVDSCQGDSGGPLSSVEADGRIFQAGVVSWGDGCAQRNKPGVYTRLPLFRDWIKENTGV

SEQ ID NO: 29 - DNA, 723 bp, Homo sapiens
gttgttgggggcacggatgcggatgagggcgagtggccctggcaggtaagcctgcatgctctgggccagggccacatctgcggtgcttccctcatctctcccaactggctggtctctgccgcacactgctacatcgatgacagaggattcaggtactcagaccccacgcagtggacggccttcctgggcttgcacgaccagagccagcgcagcgcccctggggtgcaggagcgcaggctcaagcgcatcatctcccaccccttcttcaatgactggaccttcgactatgacatcgcgctgctggagctggagaaaccggcagagtacagctccatggtgcggcccatctgcctgccggacgcctcccatgtcttccctgccggcaaggccatctgggtcacgggctggggacacacccaggccggaggcactggcgcgctgatcctgcaaaagggtgagatccgcgtcatcaaccagaccacctgcgagaacctcctgccgcagcagatcacgccgcgcatgatgtgcgtgggcttcctcagcggcggcgtggactcctgccagggtgattccgggggacccctgtccagcgtggaggcggatgggcggatcttccaggccggtgtggtgagctggggagacggctgcgctcagaggaacaagccaggcgtgtacacaaggctccctctgtttcgggactggatcaaagagaacactggggta

SEQ ID NO: 30 - protein, 241 aa, Homo sapiens
VVGGTDADEGEWPWQVSLHALGQGHICGASLISPNWLVSAAHCYIDDRGFRYSDPTQWTAFLGLHDQSQRSAPGVQERRLKRIISHPFFNDWTFDYDIALLELEKPAEYSSMVRPICLPDASHVFPAGKAIWVTGWGHTQAGGTGALILQKGEIRVINQTTCENLLPQQITPRMMCVGFLSGGVDSCQGDSGGPLSSVEADGRIFQAGVVSWGDGCAQRNKPGVYTRLPLFRDWIKENTGV

SEQ ID NO: 31 - DNA, 723 bp, Homo sapiens
gttgttgggggcacggatgcggatgagggcgagtggccctggcaggtaagcctgcatgctctgggccagggccacatctgcggtgcttccctcatctctcccaactggctggtctctgccgcacactgctacatcgatgacagaggattcaggtactcagaccccacgcagtggacggccttcctgggcttgcacgaccagagccagcgcagcgcccctggggtgcaggagcgcaggctcaagcgcatcatctcccaccccttcttcaatgactggaccttcgactatgacatcgcgctgctggagctggagaaaccggcagagtacagctccatggtgcggcccatctgcctgccggacgcctcccatgtcttccctgccggcaaggccatctgggtcacgggctggggacacacccagtggggaggcactggcgcgctgatcctgcaaaagggtgagatccgcgtcatcaaccagaccacctgcgagaacctcctgccgcagcagatcacgccgcgcatgatgtgcgtgggcttcctcagcggcggcgtggactcctgccagggtgattccgggggacccctgtccagcgtggaggcggatgggcggatcttccaggccggtgtggtgagctggggagacggctgcgctcagaggaacaagccaggcgtgtacacaaggctccctctgtttcgggactggatcaaagagaacactggggta

SEQ ID NO: 32 - protein, 241 aa, Homo sapiens
VVGGTDADEGEWPWQVSLHALGQGHICGASLISPNWLVSAAHCYIDDRGFRYSDPTQWTAFLGLHDQSQRSAPGVQERRLKRIISHPFFNDWTFDYDIALLELEKPAEYSSMVRPICLPDASHVFPAGKAIWVTGWGHTQWGGTGALILQKGEIRVINQTTCENLLPQQITPRMMCVGFLSGGVDSCQGDSGGPLSSVEADGRIFQAGVVSWGDGCAQRNKPGVYTRLPLFRDWIKENTGV

SEQ ID NO: 33 - DNA, 723 bp, Homo sapiens
gttgttgggggcacggatgcggatgagggcgagtggccctggcaggtaagcctgcatgctctgggccagggccacatctgcggtgcttccctcatctctcccaactggctggtctctgccgcacactgctacatcgatgacagaggattcaggtactcagaccccacgcagtggacggccttcctgggcttgcacgaccagagccagcgcagcgcccctggggtgcaggagcgcaggctcaagcgcatcatctcccaccccttcttcaatgactggaccttcgactatgacatcgcgctgctggagctggagaaaccggcagagtacagctccatggtgcggcccatctgcctgccggacgcctcccatgtcttccctgccggcaaggccatctgggtcacgggctggggacacacccagaggggaggcactggcgcgctgatcctgcaaaagggtgagatccgcgtcatcaaccagaccacctgcgagaacctcctgccgcagcagatcacgccgcgcatgatgtgcgtgggcttcctcagcggcggcgtggactcctgccagggtgattccgggggacccctgtccagcgtggaggcggatgggcggatcttccaggccggtgtggtgagctggggagacggctgcgctcagaggaacaagccaggcgtgtacacaaggctccctctgtttcgggactggatcaaagagaacactggggta

SEQ ID NO: 34 - protein, 241 aa, Homo sapiens
VVGGTDADEGEWPWQVSLHALGQGHICGASLISPNWLVSAAHCYIDDRGFRYSDPTQWTAFLGLHDQSQRSAPGVQERRLKRIISHPFFNDWTFDYDIALLELEKPAEYSSMVRPICLPDASHVFPAGKAIWVTGWGHTQRGGTGALILQKGEIRVINQTTCENLLPQQITPRMMCVGFLSGGVDSCQGDSGGPLSSVEADGRIFQAGVVSWGDGCAQRNKPGVYTRLPLFRDWIKENTGV

SEQ ID NO: 35 - DNA, 723 bp, Homo sapiens
gttgttgggggcacggatgcggatgagggcgagtggccctggcaggtaagcctgcatgctctgggccagggccacatctgcggtgcttccctcatctctcccaactggctggtctctgccgcacactgctacatcgatgacagaggattcaggtactcagaccccacgcagtggacggccttcctgggcttgcacgaccagagccagcgcagcgcccctggggtgcaggagcgcaggctcaagcgcatcatctcccaccccttcttcaatgactggaccttcgactatgacatcgcgctgctggagctggagaaaccggcagagtacagctccatggtgcggcccatctgcctgccggacgcctcccatgtcttccctgccggcaaggccatctgggtcacgggctggggacacacccagaggggaggcactggcgcgctgatcctgcaaaagggtgagatccgcgtcatcaaccagaccacctgcgagaacctcctgccgcagcagatcacgccgcgcatgatgtgcgtgggcttcctcagcggcggcgtggactcctgccggggtgattccgggggacccctgtccagcgtggaggcggatgggcggatcttccaggccggtgtggtgagctggggagacggctgcgctcagaggaacaagccaggcgtgtacacaaggctccctctgtttcgggactggatcaaagagaacactggggta

SEQ ID NO: 36 - protein, 241 aa, Homo sapiens
VVGGTDADEGEWPWQVSLHALGQGHICGASLISPNWLVSAAHCYIDDRGFRYSDPTQWTAFLGLHDQSQRSAPGVQERRLKRIISHPFFNDWTFDYDIALLELEKPAEYSSMVRPICLPDASHVFPAGKAIWVTGWGHTQRGGTGALILQKGEIRVINQTTCENLLPQQITPRMMCVGFLSGGVDSCRGDSGGPLSSVEADGRIFQAGVVSWGDGCAQRNKPGVYTRLPLFRDWIKENTGV

SEQ ID NO: 37 - DNA, 723 bp, Homo sapiens
gttgttgggggcacggatgcggatgagggcgagtggccctggcaggtaagcctgcatgctctgggccagggccacatctgcggtgcttccctcatctctcccaactggctggtctctgccgcacactgctacatcgatgacagaggattcaggtactcagaccccacgcagtggacggccttcctgggcttgcacgaccagagccagcgcagcgcccctggggtgcaggagcgcaggctcaagcgcatcatctcccaccccttcttcaatgactggaccttcgactatgacatcgcgctgctggagctggagaaaccggcagagtacagctccatggtgcggcccatctgcctgccggacgcctcccatgtcttccctgccggcaaggccatctgggtcacgggctggggacacacccagaggggaggcactggcgcgctgatcctgcaaaagggtgagatccgcgtcatcaaccagaccacctgcgagaacctcctgccgcagcagatcacgccgcgcatgatgtgcgtgggcttcctcagcggcggcgtggactcctgccggggtgattccgggggacccctgtccagcgtggaggcggatgggcggatcttccaggccggtgtggtgagctggggagacggctgcgctcagaggaacgcgccaggcgtgtacacaaggctccctctgtttcgggactggatcaaagagaacactggggta

SEQ ID NO: 38 - protein, 241 aa, Homo sapiens
VVGGTDADEGEWPWQVSLHALGQGHICGASLISPNWLVSAAHCYIDDRGFRYSDPTQWTAFLGLHDQSQRSAPGVQERRLKRIISHPFFNDWTFDYDIALLELEKPAEYSSMVRPICLPDASHVFPAGKAIWVTGWGHTQRGGTGALILQKGEIRVINQTTCENLLPQQITPRMMCVGFLSGGVDSCRGDSGGPLSSVEADGRIFQAGVVSWGDGCAQRNAPGVYTRLPLFRDWIKENTGV

SEQ ID NO: 39 - DNA, 723 bp, Homo sapiens
gttgttgggggcacggatgcggatgagggcgagtggccctggcaggtaagcctgcatgctctgggccagggccacatctgcggtgcttccctcatctctcccaactggctggtctctgccgcacactgctacatcgatgacagaggattcaggtactcagaccccacgcagtggacggccttcctgggcttgcacgaccagagccagcgcagcgcccctggggtgcaggagcgcaggctcaagcgcatcatctcccaccccttcttcaatgactggaccttcgactatgacatcgcgctgctggagctggagaaaccggcagagtacagctccatggtgcggcccatctgcctgccggacgcctcccatgtcttccctgccggcaaggccatctgggtcacgggctggggacacacccagaggggaggcactggcgcgctgatcctgcaaaagggtgagatccgcgtcatcaaccagaccacctgcgagaacctcctgccgcagcagatcacgccgcgcatgatgtgcgtgggcttcctcagcggcggcgtggactcctgccggggtgattccgggggacccctgtccagcgtggaggcggatgggcggatcttccaggccggtgtggtgagctggggagacggctgcgctcagaggaacttcccaggcgtgtacacaaggctccctctgtttcgggactggatcaaagagaacactggggta

SEQ ID NO: 40 - protein, 241 aa, Homo sapiens
VVGGTDADEGEWPWQVSLHALGQGHICGASLISPNWLVSAAHCYIDDRGFRYSDPTQWTAFLGLHDQSQRSAPGVQERRLKRIISHPFFNDWTFDYDIALLELEKPAEYSSMVRPICLPDASHVFPAGKAIWVTGWGHTQRGGTGALILQKGEIRVINQTTCENLLPQQITPRMMCVGFLSGGVDSCRGDSGGPLSSVEADGRIFQAGVVSWGDGCAQRNFPGVYTRLPLFRDWIKENTGV

SEQ ID NO: 41 - protein, 241 aa, Homo sapiens
VVGGTDADEGEWPWQVSLHALGQGHICGASLISPNWLVSAAHCYIDDRGFRYSDPTQWTAFLGLHDQSQRSAPGVQERRLKRIISHPFFNDFTFDYDIALLELEKPAEYSSMVRPICLPDASHVFPAGKAIWVTGWGHTQYGGTGALILQKGEIRVINQTTCENLLPHQITPRMMCVGFLSGGVDSCQGDSGGPLSSVEADGRIFQAGVVSWGDGCAQRNKPGVYTRLPLFRDWIKENTGV

SEQ ID NO: 42 - protein, 241 aa, Homo sapiens
VVGGTDADEGEWPWQVSLHALGQGHICGASLISPNWLVSAAHCYIDDRGFRYSDPTQWTAFLGLHDQSQRSAPGVQERRLKRIISHPFFNDFTFDYDIALLELEKPAEYSSMVRPICLPDASHVFPAGKAIWVTGWGHTQYGGTGALILQKGEIRVINQTTCENLLPQQITPRMMCVGFLSGGVDSCQGDSGGPLSSVEADGRIFQAGVVSWGQGCAQRNKPGVYTRLPLFRDWIKENTGV

SEQ ID NO: 43 - protein, 241 aa, Homo sapiens
VVGGTDADEGEWPWQVSLHALGQGHICGASLISPNWLVSAAHCYIDDRGFRYSDPTQWTAFLGLHDQSQRSAPGVQERRLKRIISHPFFNDFTFDYDIALLELEKPAEYSSMVRPICLPDASHVFPAGKAIWVTGWGHTQYGGTGALILQKGEIRVINQTTCENLLPQQITPRMMCVGFLSGGVDSCQGDSGGPLSSVEADGRIFQAGVVSWGNGCAQRNKPGVYTRLPLFRDWIKENTGV

SEQ ID NO: 44 - protein, 241 aa, Homo sapiens
VVGGTDADEGEWPWQVSLHALGQGHICGASLISPNWLVSAAHCYIDDRGFRYSDPTQWTAFLGLHDQSQRSAPGVQERRLKRIISHPFFNDFTFDYDIALLELEKPAEYSSMVRPICLPDASHVFPAGKAIWVTGWGHTQYGGTGALILQKGEIRVINQTTCENLLPQQITPRMMCVGFLSGGVDSCQGDSGGPLSSVEADGRIFQAGVVSWGHGCAQRNKPGVYTRLPLFRDWIKENTGV

SEQ ID NO: 45 - protein, 241 aa, Homo sapiens
VVGGTDADEGEWPWQVSLHALGQGHICGASLISPNWLVSAAHCYIDDRGFRYSDPTQWTAFLGLHDQSQRSAPGVQERRLKRIISHPFFNAFTFDYDIALLELEKPAEYSSMVRPICLPDASHVFPAGKAIWVTGWGHTQYGGTGALILQKGEIRVINQTTCENLLPQQITPRMMCVGFLSGGVDSCQGDSGGPLSSVEADGRIFQAGVVSWGDGCAQRNKPGVYTRLPLFRDWIKENTGV

SEQ ID NO: 46 - protein, 241 aa, Homo sapiens
VVGGTDADEGEWPWQVSLHALGQGHICGASLISPNWLVSAAHCYIDDRGFRYSDPTQWTAFLGLHDQSQRSAPGVQERRLKRIISHPFFNVFTFDYDIALLELEKPAEYSSMVRPICLPDASHVFPAGKAIWVTGWGHTQYGGTGALILQKGEIRVINQTTCENLLPQQITPRMMCVGFLSGGVDSCQGDSGGPLSSVEADGRIFQAGVVSWGDGCAQRNKPGVYTRLPLFRDWIKENTGV

SEQ ID NO: 47 - protein, 241 aa, Homo sapiens
VVGGTDADEGEWPWQVSLHALGQGHICGASLISPNWLVSAAHCYIDDRGFRYSDPTQWTAFLGLHDQSQRSAPGVQERRLKRIISHPFFNFFTFDYDIALLELEKPAEYSSMVRPICLPDASHVFPAGKAIWVTGWGHTQYGGTGALILQKGEIRVINQTTCENLLPQQITPRMMCVGFLSGGVDSCQGDSGGPLSSVEADGRIFQAGVVSWGDGCAQRNKPGVYTRLPLFRDWIKENTGV

SEQ ID NO: 48 - protein, 241 aa, Homo sapiens
VVGGTDADEGEWPWQVSLHALGQGHICGASLISPNWLVSAAHCYIDDRGFRYSDPTQWTAFLGLHDQSQRSAPGVQERRLKRIISHPFFNSFTFDYDIALLELEKPAEYSSMVRPICLPDASHVFPAGKAIWVTGWGHTQYGGTGALILQKGEIRVINQTTCENLLPQQITPRMMCVGFLSGGVDSCQGDSGGPLSSVEADGRIFQAGVVSWGDGCAQRNKPGVYTRLPLFRDWIKENTGV

SEQ ID NO: 49 - protein, 241 aa, Homo sapiens
VVGGTDADEGEWPWQVSLHALGQGHICGASLISPNWLVSAAHCYIDDRGFRYSDPTQWTAFLGLHDQSQRSAPGVQERRLKRIISHPFFNTFTFDYDIALLELEKPAEYSSMVRPICLPDASHVFPAGKAIWVTGWGHTQYGGTGALILQKGEIRVINQTTCENLLPQQITPRMMCVGFLSGGVDSCQGDSGGPLSSVEADGRIFQAGVVSWGDGCAQRNKPGVYTRLPLFRDWIKENTGV

SEQ ID NO: 50 - protein, 241 aa, Homo sapiens
VVGGTDADEGEWPWQVSLHALGQGHICGASLISPNWLVSAAHCYIDDRGFRYSDPTQWTAFLGLHDQSQRSAPGVQERRLKRIISHPFFNDFTFDYDIALLELEKPAEYSSMVRPICLPDASHVFPAGKAIWVTGWGHTQYGGTGALILQKGEIRVINQTTCENLLPQQITPRMMCVGFLSGGVDSCLGDSGGPLSSVEADGRIFQAGVVSWGDGCAQRNKPGVYTRLPLFRDWIKENTGV

SEQ ID NO: 51 - protein, 241 aa, Homo sapiens
VVGGTDADEGEWPWQVSLHALGQGHICGASLISPNWLVSAAHCYIDDRGFRYSDPTQWTAFLGLHDQSQRSAPGVQERRLKRIISHPFFNDFTFDYDIALLELEKPAEYSSMVRPICLPDASHVFPAGKAIWVTGWGHTQYGGTGALILQKGEIRVINQTTCENLLPQQITPRMMCVGFLSGGVDSCIGDSGGPLSSVEADGRIFQAGVVSWGDGCAQRNKPGVYTRLPLFRDWIKENTGV

SEQ ID NO: 52 - protein, 241 aa, Homo sapiens
VVGGTDADEGEWPWQVSLHALGQGHICGASLISPNWLVSAAHCYIDDRGFRYSDPTQWTAFLGLHDQSQRSAPGVQERRLKRIISHPFFNDFTFDYDIALLELEKPAEYSSMVRPICLPDASHVFPAGKAIWVTGWGHTQYGGTGALILQKGEIRVINQTTCENLLPQQITPRMMCVGFLSGGVDSCFGDSGGPLSSVEADGRIFQAGVVSWGDGCAQRNKPGVYTRLPLFRDWIKENTGV

SEQ ID NO: 53 - protein, 241 aa, Homo sapiens
VVGGTDADEGEWPWQVSLHALGQGHICGASLISPNWLVSAAHCYIDDRGFRYSDPTQWTAFLGLHDQSQRSAPGVQERRLKRIISHPFFNDFTFDYDIALLELEKPAEYSSMVRPICLPDASHVFPAGKAIWVTGWGHTQFGGTGALILQKGEIRVINQTTCENLLPQQITPRMMCVGFLSGGVDSCQGDSGGPLSSVEADGRIFQAGVVSWGDGCAQRNKPGVYTRLPLFRDWIKENTGV

SEQ ID NO: 54 - protein, 241 aa, Homo sapiens
VVGGTDADEGEWPWQVSLHALGQGHICGASLISPNWLVSAAHCYIDDRGFRYSDPTQWTAFLGLHDQSQRSAPGVQERRLKRIISHPFFNDFTADYDIALLELEKPAEYSSMVRPICLPDASHVFPAGKAIWVTGWGHTQYGGTGALILQKGEIRVINQTTCENLLPQQITPRMMCVGFLSGGVDSCQGDSGGPLSSVEADGRIFQAGVVSWGDGCAQRNKPGVYTRLPLFRDWIKENTGV

SEQ ID NO: 55 - protein, 241 aa, Homo sapiens
VVGGTDADEGEWPWQVSLHALGQGHICGASLISPNWLVSAAHCYIDDRGFRYSDPTQWTAFLGLHDQSQRSAPGVQERRLKRIISHPFFNDFTVDYDIALLELEKPAEYSSMVRPICLPDASHVFPAGKAIWVTGWGHTQYGGTGALILQKGEIRVINQTTCENLLPQQITPRMMCVGFLSGGVDSCQGDSGGPLSSVEADGRIFQAGVVSWGDGCAQRNKPGVYTRLPLFRDWIKENTGV

SEQ ID NO: 56 - protein, 241 aa, Homo sapiens
VVGGTDADEGEWPWQVSLHALGQGHICGASLISPNWLVSAAHCYIDDRGFRYSDPTQWTAFLGLHDQSQRSAPGVQERRLKRIISHPFFNDFTSDYDIALLELEKPAEYSSMVRPICLPDASHVFPAGKAIWVTGWGHTQYGGTGALILQKGEIRVINQTTCENLLPQQITPRMMCVGFLSGGVDSCQGDSGGPLSSVEADGRIFQAGVVSWGDGCAQRNKPGVYTRLPLFRDWIKENTGV

SEQ ID NO: 57 - protein, 241 aa, Homo sapiens
VVGGTDADEGEWPWQVSLHALGQGHICGASLISPNWLVSAAHCYIDDRGFRYSDPTQWTAFLGLHDQSQRSAPGVQERRLKRIISHPFFNDFTGDYDIALLELEKPAEYSSMVRPICLPDASHVFPAGKAIWVTGWGHTQYGGTGALILQKGEIRVINQTTCENLLPQQITPRMMCVGFLSGGVDSCQGDSGGPLSSVEADGRIFQAGVVSWGDGCAQRNKPGVYTRLPLFRDWIKENTGV

SEQ ID NO: 58 - protein, 241 aa, Homo sapiens
VVGGTDADEGEWPWQVSLHALGQGHICGASLISPNWLVSAAHCYIDDRGFRYSDPTQWTAFLGLHDQSQRSAPGVQERRLKRIISHPFFNDFTFDYDIALLELEKPAEYSSMVRPICLPDASHVFPAGKAIWVTGWGHTQYGGTGALILQKGEIRVINQTTCENLLPQQITPRMMCVGFLSGGVDSCQGDSGGPLSSVEADGRIFQAGVVSFGDGCAQRNKPGVYTRLPLFRDWIKENTGV

SEQ ID NO: 59 - protein, 241 aa, Homo sapiens
VVGGTDADEGEWPWQVSLHALGQGHICGASLISPNWLVSAAHCYIDDRGFRYSDPTQWTAFLGLHDQSQRSAPGVQERRLKRIISHPFFNDFTFDYDIALLELEKPAEYSSMVRPICLPDASHVFPAGKAIWVTGWGHTQYGGTGALILQKGEIRVINQTTCENLLPQQITPRMMCVGFLSGGVDSCQGDSGGPLSSVEADGRIFQAGVVSYGDGCAQRNKPGVYTRLPLFRDWIKENTGV

SEQ ID NO: 60 - protein, 241 aa, Homo sapiens
VVGGTDADEGEWPWQVSLHALGQGHICGASLISPNWLVSAAHCYIDDRGFRYSDPTQWTAFLGLHDQSQRSAPGVQERRLKRIISHPFFNDFTFDYDIALLELEKPAEYSSMVRPICLPDASHVFPAGKAIWVTGWGHTQYGGTGALILQKGEIRVINQTTCENLLPAQITPRMMCVGFLSGGVDSCQGDSGGPLSSVEADGRIFQAGVVSWGDGCAQRNKPGVYTRLPLFRDWIKENTGV

SEQ ID NO: 61 - protein, 241 aa, Homo sapiens
VVGGTDADEGEWPWQVSLHALGQGHICGASLISPNWLVSAAHCYIDDRGFRYSDPTQWTAFLGLHDQSQRSAPGVQERRLKRIISHPFFNDFTFDYDIALLELEKPAEYSSMVRPICLPDASHVFPAGKAIWVTGWGHTQYGGTGALILQKGEIRVINQTTCENLLPVQITPRMMCVGFLSGGVDSCQGDSGGPLSSVEADGRIFQAGVVSWGDGCAQRNKPGVYTRLPLFRDWIKENTGV

SEQ ID NO: 62 - protein, 241 aa, Homo sapiens
VVGGTDADEGEWPWQVSLHALGQGHICGASLISPNWLVSAAHCYIDDRGFRYSDPTQWTAFLGLHDQSQRSAPGVQERRLKRIISHPFFNDFTFDYDIALLELEKPAEYSSMVRPICLPDASHVFPAGKAIWVTGWGHTQYGGTGALILQKGEIRVINQTTCENLLPFQITPRMMCVGFLSGGVDSCQGDSGGPLSSVEADGRIFQAGVVSWGDGCAQRNKPGVYTRLPLFRDWIKENTGV

SEQ ID NO: 63 - protein, 241 aa, Homo sapiens
VVGGTDADEGEWPWQVSLHALGQGHICGASLISPNWLVSAAHCYIDDRGFRYSDPTQWTAFLGLHDQSQRSAPGVQERRLKRIISHPFFNDFTFDYDIALLELEKPAEYSSMVRPICLPDASHVFPAGKAIWVTGWGHTQYGGTGALILQKGEIRVINQTTCENLLPRQITPRMMCVGFLSGGVDSCQGDSGGPLSSVEADGRIFQAGVVSWGDGCAQRNKPGVYTRLPLFRDWIKENTGV

SEQ ID NO: 64 - protein, 241 aa, Homo sapiens
VVGGTDADEGEWPWQVSLHALGQGHICGASLISPNWLVSAAHCYIDDRGFRYSDPTQWTAFLGLHDQSQRSAPGVQERRLKRIISHPFFNDFTFDYDIALLELEKPAEYSSMVRPICLPDASHVFPAGKAIWVTGWGHTQYGGTGALILQKGEIRVINQTTCENLLPKQITPRMMCVGFLSGGVDSCQGDSGGPLSSVEADGRIFQAGVVSWGDGCAQRNKPGVYTRLPLFRDWIKENTGV

SEQ ID NO: 65 - protein, 241 aa, Homo sapiens
VVGGTDADEGEWPWQVSLHALGQGHICGASLISPNWLVSAAHCYIDDRGFRYSDPTQWTAFLGLHDQSQRSAPGVQERRLKRIISHPFFNDFTFDYDIALLELEKPAEYSSMVRPICLPDASHVFPAGKAIWVTGWGHTQYGGTGALILQKGEIRVINQTTCENLLPQQITPRMMCVGFLSGGVDSCQGDSGGPLSSVEADGRIFQAGVVSWGAGCAQRNKPGVYTRLPLFRDWIKENTGV

SEQ ID NO: 66 - protein, 241 aa, Homo sapiens
VVGGTDADEGEWPWQVSLHALGQGHICGASLISPNWLVSAAHCYIDDRGFRYSDPTQWTAFLGLHDQSQRSAPGVQERRLKRIISHPFFNDFTFDYDIALLELEKPAEYSSMVRPICLPDASHVFPAGKAIWVTGWGHTQYGGTGALILQKGEIRVINQTTCENLLPQQITPRMMCVGFLSGGVDSCQGDSGGPLSSVEADGRIFQAGVVSWGVGCAQRNKPGVYTRLPLFRDWIKENTGV

SEQ ID NO: 67 - protein, 241 aa, Homo sapiens
VVGGTDADEGEWPWQVSLHALGQGHICGASLISPNWLVSAAHCYIDDRGFRYSDPTQWTAFLGLHDQSQRSAPGVQERRLKRIISHPFFNDFTFDYDIALLELEKPAEYSSMVRPICLPDASHVFPAGKAIWVTGWGHTQYGGTGALILQKGEIRVINQTTCENLLPQQITPRMMCVGFLSGGVDSCEGDSGGPLSSVEADGRIFQAGVVSWGDGCAQRNKPGVYTRLPLFRDWIKENTGV

SEQ ID NO: 68 - protein, 241 aa, Homo sapiens
VVGGTDADEGEWPWQVSLHALGQGHICGASLISPNWLVSAAHCYIDDRGFRYSDPTQWTAFLGLHDQSQRSAPGVQERRLKRIISHPFFNDFTWDYDIALLELEKPAEYSSMVRPICLPDASHVFPAGKAIWVTGWGHTQYGGTGALILQKGEIRVINQTTCENLLPQQITPRMMCVGFLSGGVDSCQGDSGGPLSSVEADGRIFQAGVVSWGDGCAQRNKPGVYTRLPLFRDWIKENTGV

SEQ ID NO: 69 - protein, 241 aa, Homo sapiens
VVGGTDADEGEWPWQVSLHALGQGHICGASLISPNWLVSAAHCYIDDRGFRYSDPTQWTAFLGLHDQSQRSAPGVQERRLKRIISHPFFNDFTYDYDIALLELEKPAEYSSMVRPICLPDASHVFPAGKAIWVTGWGHTQYGGTGALILQKGEIRVINQTTCENLLPQQITPRMMCVGFLSGGVDSCQGDSGGPLSSVEADGRIFQAGVVSWGDGCAQRNKPGVYTRLPLFRDWIKENTGV

SEQ ID NO: 70 - DNA, 1165 bp, Homo sapiens
gctgggagtagagggcagagctcccaccccgccccgcccccagggggcgccccgggcccggcgcgagaggaggcagagggggcgtcaggccgcgggagaggaggccatgggcgcgcgcggggcgctgctgctggcgctgctgctggctcgggctggactcaggaagccggagtcgcaggaggcggcgccgttatcaggaccatgcggccgacgggtcatcacgtcgcgcatcgtgggtggagaggacgccgaactcgggcgttggccgtggcaggggagcctgcgcctgtgggattcccacgtatgcggagtgagcctgctcagccaccgctgggcactcacggcggcgcactgctttgaaacctatagtgaccttagtgatccctccgggtggatggtccagtttggccagctgacttccatgccatccttctggagcctgcaggcctactacacccgttacttcgtatcgaatatctatctgagccctcgctacctggggaattcaccctatgacattgccttggtgaagctgtctgcacctgtcacctacactaaacacatccagcccatctgtctccaggcctccacatttgagtttgagaaccggacagactgctgggtgactggctgggggtacatcaaagaggatgaggcactgccatctccccacaccctccaggaagttcaggtcgccatcataaacaactctatgtgcaaccacctcttcctcaagtacagtttccgcaaggacatctttggagacatggtttgtgctggcaatgcccaaggcgggaaggatgcctgcttcggtgactcaggtggacccttggcctgtaacaagaatggactgtggtatcagattggagtcgtgagctggggagtgggctgtggtcggcccaatcggcccggtgtctacaccaatatcagccaccactttgagtggatccagaagctgatggcccagagtggcatgtcccagccagacccctcctggccgctactctttttccctcttctctgggctctcccactcctggggccggtctgagcctacctgagcccatgcagcctggggccactgccaagtcaggccctggttctcttctgtcttgtttggtaataaacacattccagttgatgccttgcagggcattcttcaaaa

SEQ ID NO: 71 - protein, 314 aa, Homo sapiens
MGARGALLLALLLARAGLRKPESQEAAPLSGPCGRRVITSRIVGGEDAELGRWPWQGSLRLWDSHVCGVSLLSHRWALTAAHCFETYSDLSDPSGWMVQFGQLTSMPSFWSLQAYYTRYFVSNIYLSPRYLGNSPYDIALVKLSAPVTYTKHIQPICLQASTFEFENRTDCWVTGWGYIKEDEALPSPHTLQEVQVAIINNSMCNHLFLKYSFRKDIFGDMVCAGNAQGGKDACFGDSGGPLACNKNGLWYQIGVVSWGVGCGRPNRPGVYTNISHHFEWIQKLMAQSGMSQPDPSWPLLFFPLLWALPLLGPV

SEQ ID NO: 72 - DNA, 1159 bp, Homo sapiens
gctgggagtagagggcagagctcccaccccgccccgcccccagggggcgccccgggcccggcgcgagaggaggcagagggggcgtcaggccgcgggagaggaggccatgggcgcgcgcggggcgctgctgctggcgctgctgctggctcgggctggactcaggaagccggagtcgcaggaggcggcgccgttatcaggaccatgcggccgacgggtcatcacgtcgcgcatcgtgggtggagaggacgccgaactcgggcgttggccgtggcaggggagcctgcgcctgtgggattcccacgtatgcggagtgagcctgctcagccaccgctgggcactcacggcggcgcactgctttgaaactgaccttagtgatccctccgggtggatggtccagtttggccagctgacttccatgccatccttctggagcctgcaggcctactacacccgttacttcgtatcgaatatctatctgagccctcgctacctggggaattcaccctatgacattgccttggtgaagctgtctgcacctgtcacctacactaaacacatccagcccatctgtctccaggcctccacatttgagtttgagaaccggacagactgctgggtgactggctgggggtacatcaaagaggatgaggcactgccatctccccacaccctccaggaagttcaggtcgccatcataaacaactctatgtgcaaccacctcttcctcaagtacagtttccgcaaggacatctttggagacatggtttgtgctggcaatgcccaaggcgggaaggatgcctgcttcggtgactcaggtggacccttggcctgtaacaagaatggactgtggtatcagattggagtcgtgagctggggagtgggctgtggtcggcccaatcggcccggtgtctacaccaatatcagccaccactttgagtggatccagaagctgatggcccagagtggcatgtcccagccagacccctcctggccgctactctttttccctcttctctgggctctcccactcctggggccggtctgagcctacctgagcccatgcagcctggggccactgccaagtcaggccctggttctcttctgtcttgtttggtaataaacacattccagttgatgccttgcagggcattcttcaaaa

SEQ ID NO: 73 - protein, 312 aa, Homo sapiens
MGARGALLLALLLARAGLRKPESQEAAPLSGPCGRRVITSRIVGGEDAELGRWPWQGSLRLWDSHVCGVSLLSHRWALTAAHCFETDLSDPSGWMVQFGQLTSMPSFWSLQAYYTRYFVSNIYLSPRYLGNSPYDIALVKLSAPVTYTKHIQPICLQASTFEFENRTDCWVTGWGYIKEDEALPSPHTLQEVQVAIINNSMCNHLFLKYSFRKDIFGDMVCAGNAQGGKDACFGDSGGPLACNKNGLWYQIGVVSWGVGCGRPNRPGVYTNISHHFEWIQKLMAQSGMSQPDPSWPLLFFPLLWALPLLGPV

SEQ ID NO: 74 - DNA, 1135 bp, Homo sapiens
gctgggagtagagggcagagctcccaccccgccccgcccccagggggcgccccgggcccggcgcgagaggaggcagagggggcgtcaggccgcgggagaggaggccatgggcgcgcgcggggcgctgctgctggcgctgctgctggctcgggctggactcaggaagccggagtcgcaggaggcggcgccgttatcaggaccatgcggccgacgggtcatcacgtcgcgcatcgtgggtggagaggacgccgaactcgggcgttggccgtggcaggggagcctgcgcctgtgggattcccacgtatgcggagtgagcctgctcagccaccgctgggcactcacggcggcgcactgctttgaaacctatagtgaccttagtgatccctccgggtggatggtccagtttggccagctgacttccatgccatccttctggagcctgcaggcctactacacccgttacttcgtatcgaatatctatctgagccctcgctacctggggaattcaccctatgacattgccttggtgaagctgtctgcacctgtcacctacactaaacacatccagcccatctgtctccaggcctccacatttgagtttgagaaccggacagactgctgggtgactggctgggggtacatcaaagaggatgaggcactgccatctccccacaccctccaggaagttcaggtcgccatcataaacaactctatgtgcaaccacctcttcctcaagtacagtttccgcaaggacatctttggagacatgggtgactcaggtggacccttggcctgtaacaagaatggactgtggtatcagattggagtcgtgagctggggagtgggctgtggtcggcccaatcggcccggtgtctacaccaatatcagccaccactttgagtggatccagaagctgatggcccagagtggcatgtcccagccagacccctcctggccgctactctttttccctcttctctgggctctcccactcctggggccggtctgagcctacctgagcccatgcagcctggggccactgccaagtcaggccctggttctcttctgtcttgtttggtaataaacacattccagttgatgccttgcagggcattcttcaaaaaaaaaaaaaaaa

SEQ ID NO: 75 - protein, 300 aa, Homo sapiens
MGARGALLLALLLARAGLRKPESQEAAPLSGPCGRRVITSRIVGGEDAELGRWPWQGSLRLWDSHVCGVSLLSHRWALTAAHCFETYSDLSDPSGWMVQFGQLTSMPSFWSLQAYYTRYFVSNIYLSPRYLGNSPYDIALVKLSAPVTYTKHIQPICLQASTFEFENRTDCWVTGWGYIKEDEALPSPHTLQEVQVAIINNSMCNHLFLKYSFRKDIFGDMGDSGGPLACNKNGLWYQIGVVSWGVGCGRPNRPGVYTNISHHFEWIQKLMAQSGMSQPDPSWPLLFFPLLWALPLLGPV

SEQ ID NO: 76 - DNA, 1194 bp, Homo sapiens
ataaatggggaggggagagcccactgggtagaaggaacagggagcggccaggatgctgaatctgctgctgctggcgctgcccgtcctggcgagccgcgcctacgcggcccctgccccaggccaggccctgcagcgagtgggcatcgtcgggggtcaggaggcccccaggagcaagtggccctggcaggtgagcctgagagtccacggcccatactggatgcacttctgcgggggctccctcatccacccccagtgggtgctgaccgcagcgcactgcgtgggaccggacgtcaaggatctggccgccctcagggtgcaactgcgggagcagcacctctactaccaggaccagctgctgccggtcagcaggatcatcgtgcacccacagttctacaccgcccagatcggagcggacatcgccctgctggagctggaggagccggtgaacgtctccagccacgtccacacggtcaccctgccccctgcctcagagaccttccccccggggatgccgtgctgggtcactggctggggcgatgtggacaatgatgagcgcctcccaccgccatttcctctgaagcaggtgaaggtccccataatggaaaaccacatttgtgacgcaaaataccaccttggcgcctacacgggagacgacgtccgcatcgtccgtgacgacatgctgtgtgccgggaacacccggagggactcatgccagggcgactccggagggcccctggtgtgcaaggtgaatggcacctggctgcaggcgggcgtggtcagctggggcgagggctgtgcccagcccaaccggcctggcatctacacccgtgtcacctactacttggactggatccaccactatgtccccaaaaagccgtgagtcaggcctgggttggccacctgggtcactggaggaccaacccctgctgtccaaaacaccactgcttcctacccaggtggcgactgccccccacaccttccctgccccgtcctgagtgccccttcctgtcctaagccccctgctctcttctgagccccttcccctgtcctgaggacccttccctatcctgagcccccttccctgtcctaagcctgacgcctgcaccgggccctccagccctcccctgcccagatagctggtggtgggcgctaatcctcctgagtgctggacctcattaaagtgcatggaaatca

SEQ ID NO: 77 - protein, 275 aa, Homo sapiens
MLNLLLLALPVLASRAYAAPAPGQALQRVGIVGGQEAPRSKWPWQVSLRVHGPYWMHFCGGSLIHPQWVLTAAHCVGPDVKDLAALRVQLREQHLYYQDQLLPVSRIIVHPQFYTAQIGADIALLELEEPVNVSSHVHTVTLPPASETFPPGMPCWVTGWGDVDNDERLPPPFPLKQVKVPIMENHICDAKYHLGAYTGDDVRIVRDDMLCAGNTRRDSCQGDSGGPLVCKVNGTWLQAGVVSWGEGCAQPNRPGIYTRVTYYLDWIHHYVPKKP

SEQ ID NO: 78 - DNA, 1528 bp, Homo sapiens
ggaaggcacaggcctgagaagtctgcggctgagctgggagcaaatcccccaccccctacctgggggacagggcaagtgagacctggtgagggtggctcagcaggaagggaaggagaggtgtctgtgcgtcctgcacccacatctttctctgtcccctccttgccctgtctggaggctgctagactcctatcttctgaattctatagtgcctgggtctcagcgcagtgccgatggtggcccgtccttgtggttcctctctacctggggaaataaggtgcagcggccatggctacagcaagacccccctggatgtgggtgctctgtgctctgatcacagccttgcttctgggggtcacagagcatgttctcgccaacaatgatgtttcctgtgaccacccctctaacaccgtgccctctgggagcaaccaggacctgggagctggggccggggaagacgcccggtcggatgacagcagcagccgcatcatcaatggatccgactgcgatatgcacacccagccgtggcaggccgcgctgttgctaaggcccaaccagctctactgcggggcggtgttggtgcatccacagtggctgctcacggccgcccactgcaggaagaaagttttcagagtccgtctcggccactactccctgtcaccagtttatgaatctgggcagcagatgttccagggggtcaaatccatcccccaccctggctactcccaccctggccactctaacgacctcatgctcatcaaactgaacagaagaattcgtcccactaaagatgtcagacccatcaacgtctcctctcattgtccctctgctgggacaaagtgcttggtgtctggctgggggacaaccaagagcccccaagtgcacttccctaaggtcctccagtgcttgaatatcagcgtgctaagtcagaaaaggtgcgaggatgcttacccgagacagatagatgacaccatgttctgcgccggtgacaaagcaggtagagactcctgccagggtgattctggggggcctgtggtctgcaatggctccctgcagggactcgtgtcctggggagattacccttgtgcccggcccaacagaccgggtgtctacacgaacctctgcaagttcaccaagtggatccaggaaaccatccaggccaactcctgagtcatcccaggactcagcacaccggcatccccacctgctgcagggacagccctgacactcctttcagaccctcattccttcccagagatgttgagaatgttcatctctccagcccctgaccccatgtctcctggactcagggtctgcttcccccacattgggctgaccgtgtctctctagttgaaccctgggaacaatttccaaaactgtccagggcgggggttgcgtctcaatctccctggggcactttcatcctcaagctcagggcccatcccttctctgcagctctgacccaaatttagtcccagaaataaactgagaagtggaaaaaaaaaaaaaaaaaaaaaaaaaaaaaaaaaaa

SEQ ID NO: 79 - protein, 293 aa, Homo sapiens
MATARPPWMWVLCALITALLLGVTEHVLANNDVSCDHPSNTVPSGSNQDLGAGAGEDARSDDSSSRIINGSDCDMHTQPWQAALLLRPNQLYCGAVLVHPQWLLTAAHCRKKVFRVRLGHYSLSPVYESGQQMFQGVKSIPHPGYSHPGHSNDLMLIKLNRRIRPTKDVRPINVSSHCPSAGTKCLVSGWGTTKSPQVHFPKVLQCLNISVLSQKRCEDAYPRQIDDTMFCAGDKAGRDSCQGDSGGPVVCNGSLQGLVSWGDYPCARPNRPGVYTNLCKFTKWIQETIQANS

SEQ ID NO: 80 - DNA, 4942 bp, Homo sapiens
aaatcatccgtagtgcctccccgggggacacgtagaggagagaaaagcgaccaagataaaagtggacagaagaataagcgagactttttatccatgaaacagtctcctgccctcgctccggaagagcgctgccgcagagccgggtccccaaagccggtcttgagagctgatgacaataacatgggcaatggctgctctcagaagctggcgactgctaacctcctccggttcctattgctggtcctgattccatgtatctgtgctctcgttctcttgctggtgatcctgctttcctatgttggaacattacaaaaggtctattttaaatcaaatgggagtgaacctttggtcactgatggtgaaatccaagggtccgatgttattcttacaaatacaatttataaccagagcactgtggtgtctactgcacatcccgaccaacacgttccagcctggactacggatgcttctctcccaggggaccaaagtcacaggaatacaagtgcctgtatgaacatcacccacagccagtgtcagatgctgccctaccacgccacgctgacacctctcctctcagttgtcagaaacatggaaatggaaaagttcctcaagtttttcacatatctccatcgcctcagttgctatcaacatatcatgctgtttggctgtaccctcgccttccctgagtgcatcattgatggcgatgacagtcatggactcctgccctgtaggtccttctgtgaggctgcaaaagaaggctgtgaatcagtcctggggatggtgaattactcctggccggatttcctcagatgctcccagtttagaaaccaaactgaaagcagcaatgtcagcagaatttgcttctcacctcagcaggaaaacggaaagcaattgctctgtggaaggggtgagaactttctgtgtgccagtggaatctgcatccccgggaaactgcaatgtaatggctacaacgactgtgacgactggagtgacgaggctcattgcaactgcagcgagaatctgtttcactgtcacacaggcaagtgccttaattacagccttgtgtgtgatggatatgatgactgtggggatttgagtgatgagcaaaactgtgattgcaatcccacaacagagcatcgctgcggggacgggcgctgcatcgccatggagtgggtgtgtgatggtgaccacgactgtgtggataagtctgacgaggtcaactgctcctgtcacagccagggtctggtggaatgcagaaatggacaatgtatccccagcacgtttcaatgtgatggtgacgaggactgcaaggatgggagtgatgaggagaactgcagcgtcattcagacttcatgtcaagaaggagaccaaagatgcctctacaatccctgccttgattcatgtggtggtagctctctctgtgacccgaacaacagtctgaataactgtagtcaatgtgaaccaattacattggaactctgcatgaatttgccctacaacagtacaagttatccaaattattttggccacaggactcaaaaggaagcatccatcagctgggagtcttctcttttccctgcacttgttcaaaccaactgttataaatacctcatgttcttttcttgcaccattttggtaccaaaatgtgatgtgaatacaggcgagcatatccctccttgcagggcattgtgtgaacactctaaagaacgctgtgagtctgttcttgggattgtgggcctacagtggcctgaagacacagattgcagtcaatttccagaggaaaattcagacaatcaaacctgcctgatgcctgatgaatatgtggaagaatgctcacctagtcatttcaagtgccgctcaggacagtgtgttctggcttccagaagatgtgatggccaggccgactgtgacgatgacagtgatgaggaaaactgtggttgtaaagagagagatctttgggaatgtccatccaataaacaatgtttgaagcacacagtgatctgcgatgggttcccagactgccctgattacatggacgagaaaaactgctcattttgccaagatgatgagctggaatgtgcaaaccatgcgtgtgtgtcacgtgacctgtggtgtgatggtgaagccgactgctcagacagttcagatgaatgggactgtgtgaccctctctataaatgtgaactcctcttcctttctgatggttcacagagctgccacagaacaccatgtgtgtgcagatggctggcaggagatattgagtcagctggcctgcaagcagatgggtttaggagaaccatctgtgaccaaattgatacaggaacaggagaaagagccgcggtggctgacattacactccaactgggagagcctcaatgggaccactttacatgaacttctagtaaatgggcagtcttgtgagagcagaagtaaaatttctcttctgtgtactaaacaagactgtgggcgccgccctgctgcccgaatgaacaaaaggatccttggaggtcggacgagtcgccctggaaggtggccatggcagtgttctctgcagagtgaacccagtggacatatctgtggctgtgtcctcattgccaagaagtgggttctgacagttgcccactgcttcgaggggagagagaatgctgcagtttggaaagtggtgcttggcatcaacaatctagaccatccatcagtgttcatgcagacacgctttgtgaagaccatcatcctgcatccccgctacagtcgagcagtggtggactatgacatcagcatcgttgagctgagtgaagacatcagtgagactggctacgtccggcctgtctgcttgcccaacccggagcagtggctagagcctgacacgtactgctatatcacaggctggggccacatgggcaataaaatgccatttaagctgcaagagggagaggtccgcattatttctctggaacattgtcagtcctactttgacatgaagaccatcaccactcggatgatatgtgctggctatgagtctggcacagttgattcatgcatgggtgacagcggtgggcctcttgtttgtgagaagcctggaggacggtggacattatttggattaacttcatggggctccgtctgcttttccaaagtcctggggcctggcgtttatagtaatgtgtcatatttcgtcgaatggattaaaagacagatttacatccagacctttctcctaaactaattataaggatgatcagagacttttgccagctacactaaaagaaaatggccttcttgactgtgaagagctgcctgcagagagctgtacagaagcacttttcatggacagaaatgctcaatcgtgcactgcaaatttgcatgtttgttttggactaatttttttcaatttattttttcaccttcatttttctcttatttcaagttcaatgaaagactttacaaaagcaaacaaagcagactttgtccttttgccaggcctaaccatgactgcagcacaaaattatcgactctggcgagatttaaaatcaggtgctacagtaacaggttatggaatggtctcttttatcctatcacaaaaaaagacatagatatttaggctgattaattatctctaccagtttttgtttctcaagctcagtgcatagtggtaaatttcagtgttaacattggagacttgcttttctttttctttttttataccccacaattcttttttattacacttcgaattttagggtacacgagcacaacgtgcaggttagttacatatgtatacatgtgccatgttggtgtgctgaacccagtaactcgtcatttgatttattaaaagccaagataatttacatgtttaaagtatttactattacccccttctaatgtttgcataattctgagaactgataaaagacagcaataaaagaccagtgtcatccatttaggtagcaagacatattgaatgcaaagttctttagatatcaatattaacacttgacattattggaccccccattctggatgtatatcaagatcataattttatagaagagtctctatagaactgtcctcatagctgggtttgttcaggatatatgagttggctgattgagactgcaacaactacatctatatttatgggcaatattttgttttacttatgtggcaaagaactggatattaaactttgcaaaagagaatttagatgagagatgcaattttttaaaaagaaaattaatttgcatccctcgtttaattaaatttatttttcagttttcttgcgttcatccataccaacaaagtcataaagagcatattttagagcacagtaagactttgcatggagtaaaacattttgtaattttcctcaaaagatgtttaatatctggtttcttctcattggtaattaaaattttagaaatgatttttagctctaggccactttacgcaactcaatttctgaagcaattagtggtaaaaagtatttttccccactaaaaaactttaaaacacaaatcttcatatatacttaatttaattagtcaggcatccattttgccttttaaacaactaggattccctactaacctccaccagcaacctggactgcctcagcattccaaatagatactacctgcaattttatacatgtatttttgtatcttttctgtgtgtaaacatagttgaaattcaaaaagttgtagcaatttctatactattcatctcctgtccttcagtttgtataaacctaaggagagtgtgaaatccagcaactgaattgtggtcacgattgtatgaaagttcaagaacatatgtcagttttgttacagttgtagctacatactcaatgtatcaacttttagcctgctcaacttaggctcagtgaaatatatatattatacttattttaaataattcttaatacaaataaaatggtaatggtctaa

SEQ ID NO: 81 - protein, 1042 aa, Homo sapiens
MKQSPALAPEERCRRAGSPKPVLRADDNNMGNGCSQKLATANLLRFLLLVLIPCICALVLLLVILLSYVGTLQKVYFKSNGSEPLVTDGEIQGSDVILTNTIYNQSTVVSTAHPDQHVPAWTTDASLPGDQSHRNTSACMNITHSQCQMLPYHATLTPLLSVVRNMEMEKFLKFFTYLHRLSCYQHIMLFGCTLAFPECIIDGDDSHGLLPCRSFCEAAKEGCESVLGMVNYSWPDFLRCSQFRNQTESSNVSRICFSPQQENGKQLLCGRGENFLCASGICIPGKLQCNGYNDCDDWSDEAHCNCSENLFHCHTGKCLNYSLVCDGYDDCGDLSDEQNCDCNPTTEHRCGDGRCIAMEWVCDGDHDCVDKSDEVNCSCHSQGLVECRNGQCIPSTFQCDGDEDCKDGSDEENCSVIQTSCQEGDQRCLYNPCLDSCGGSSLCDPNNSLNNCSQCEPITLELCMNLPYNSTSYPNYFGHRTQKEASISWESSLFPALVQTNCYKYLMFFSCTILVPKCDVNTGEHIPPCRALCEHSKERCESVLGIVGLQWPEDTDCSQFPEENSDNQTCLMPDEYVEECSPSHFKCRSGQCVLASRRCDGQADCDDDSDEENCGCKERDLWECPSNKQCLKHTVICDGFPDCPDYMDEKNCSFCQDDELECANHACVSRDLWCDGEADCSDSSDEWDCVTLSINVNSSSFLMVHRAATEHHVCADGWQEILSQLACKQMGLGEPSVTKLIQEQEKEPRWLTLHSNWESLNGTTLHELLVNGQSCESRSKISLLCTKQDCGRRPAARMNKRILGGRTSRPGRWPWQCSLQSEPSGHICGCVLIAKKWVLTVAHCFEGRENAAVWKVVLGINNLDHPSVFMQTRFVKTIILHPRYSRAVVDYDISIVELSEDISETGYVRPVCLPNPEQWLEPDTYCYITGWGHMGNKMPFKLQEGEVRIISLEHCQSYFDMKTITTRMICAGYESGTVDSCMGDSGGPLVCEKPGGRWTLFGLTSWGSVCFSKVLGPGVYSNVSYFVEWIKRQIYIQTFLLN

SEQ ID NO: 82 - DNA, 945 bp, Homo sapiens
gcaggtaggtggacggagagatagcagcgacgaggacaggccaaacagtgacagccacgtagaggatctggcagacaaagagacaaggtgagaaggagactttggaagtgacccaccatggggctcagcatctttttgctcctgtgtgttcttgggctcagccaggcagccacaccgaagattttcaatggcactgagtgtgggcgtaactcacagccgtggcaggtggggctgtttgagggcaccagcctgcgctgcgggggtgtccttattgaccacaggtgggtcctcacagcggctcactgcagcggcagcaggtactgggtgcgcctgggggaacacagcctcagccagctcgactggaccgagcagatccggcacagcggcttctctgtgacccatcccggctacctgggagcctcgacgagccacgagcacgacctccggctgctgcggctgcgcctgcccgtccgcgtaaccagcagcgttcaacccctgcccctgcccaatgactgtgcaaccgctggcaccgagtgccacgtctcaggctggggcatcaccaaccacccacggaacccattcccggatctgctccagtgcctcaacctctccatcgtctcccatgccacctgccatggtgtgtatcccgggagaatcacgagcaacatggtgtgtgcaggcggcgtcccggggcaggatgcctgccagggtgattctgggggccccctggtgtgtgggggagtccttcaaggtctggtgtcctgggggtctgtggggccctgtggacaagatggcatccctggagtctacacctatatttgcaactccactcttgttggcctgggaacttcttggaactttaactcctgccagcccttctaagacccacgagcggggtgagagaagtgtgcaatagtctggaataaatataaatgaaggaggggc

SEQ ID NO: 83 - protein, 254 aa, Homo sapiens
MGLSIFLLLCVLGLSQAATPKIFNGTECGRNSQPWQVGLFEGTSLRCGGVLIDHRWVLTAAHCSGSRYWVRLGEHSLSQLDWTEQIRHSGFSVTHPGYLGASTSHEHDLRLLRLRLPVRVTSSVQPLPLPNDCATAGTECHVSGWGITNHPRNPFPDLLQCLNLSIVSHATCHGVYPGRITSNMVCAGGVPGQDACQGDSGGPLVCGGVLQGLVSWGSVGPCGQDGIPGVYTYICNSTLVGLGTSWNFNSCQPF

SEQ ID NO: 84 - DNA, 1074 bp, Homo sapiens
gcaggtaggtggacggagagatagcagcgacgaggacaggccaaacagtgacagccacgtagaggatctggcagacaaagagacaaggtgagaaggagactttggaagtgacccaccatggggctcagcatctttttgctcctgtgtgttcttgggctcagccaggcagccacaccgaagattttcaatggcactgagtgtgggcgtaactcacagccgtggcaggtggggctgtttgagggcaccagcctgcgctgcgggggtgtccttattgaccacaggtgggtcctcacagcggctcactgcagcggcagcaggtactgggtgcgcctgggggaacacagcctcagccagctcgactggaccgagcagatccggcacagcggcttctctgtgacccatcccggctacctgggagcctcgacgagccacgagcacgacctccggctgctgcggctgcgcctgcccgtccgcgtaaccagcagcgttcaacccctgcccctgcccaatgactgtgcaaccgctggcaccgagtgccacgtctcaggctggggcatcaccaaccacccacggaacccattcccggatctgctccagtgcctcaacctctccatcgtctcccatgccacctgccatggtgtgtatcccgggagaatcacgagcaacatggtgtgtgcaggcggcgtcccggggcaggatgcctgccagggtgattctgggggccccctggtgtgtgggggagtccttcaaggtctggtgtcctgggggtctgtggggccctgtggacaagatggcatccctggagtctacacctatatttgcaagtatgtggactggatccggatgatcatgaggaacaactgacctgtttcctccacctccacccccaccccttaacttgggtacccctctggccctcagagcaccaatatctcctccatcacttcccctagctccactcttgttggcctgggaacttcttggaactttaactcctgccagcccttctaagacccacgagcggggtgagagaagtgtgcaatagtctggaataaatataaatgaaggaggggc

SEQ ID NO: 85 - protein, 248 aa, Homo sapiens
MGLSIFLLLCVLGLSQAATPKIFNGTECGRNSQPWQVGLFEGTSLRCGGVLIDHRWVLTAAHCSGSRYWVRLGEHSLSQLDWTEQIRHSGFSVTHPGYLGASTSHEHDLRLLRLRLPVRVTSSVQPLPLPNDCATAGTECHVSGWGITNHPRNPFPDLLQCLNLSIVSHATCHGVYPGRITSNMVCAGGVPGQDACQGDSGGPLVCGGVLQGLVSWGSVGPCGQDGIPGVYTYICKYVDWIRMIMRNN

SEQ ID NO: 86 - DNA, 814 bp, Homo sapiens
gcaggtaggtggacggagagatagcagcgacgaggacaggccaaacagtgacagccacgtagaggatctggcagacaaagagacaaggtgagaaggagactttggaagtgacccaccatggggctcagcatctttttgctcctgtgtgttcttgggctcagccaggcagccacaccgaagattttcaatggcactgagtgtgggcgtaactcacagccgtggcaggtggggctgtttgagggcaccagcctgcgctgcgggggtgtccttattgaccacaggtgggtcctcacagcggctcactgcagcggcagacccattcccggatctgctccagtgcctcaacctctccatcgtctcccatgccacctgccatggtgtgtatcccgggagaatcacgagcaacatggtgtgtgcaggcggcgtcccggggcaggatgcctgccagggtgattctgggggccccctggtgtgtgggggagtccttcaaggtctggtgtcctgggggtctgtggggccctgtggacaagatggcatccctggagtctacacctatatttgcaagtatgtggactggatccggatgatcatgaggaacaactgacctgtttcctccacctccacccccaccccttaacttgggtacccctctggccctcagagcaccaatatctcctccatcacttcccctagctccactcttgttggcctgggaacttcttggaactttaactcctgccagcccttctaagacccacgagcggggtgagagaagtgtgcaatagtctggaataaatataaatgaaggaggggc

SEQ ID NO: 87 - protein, 111 aa, Homo sapiens
MGLSIFLLLCVLGLSQAATPKIFNGTECGRNSQPWQVGLFEGTSLRCGGVLIDHRWVLTAAHCSGRPIPGSAPVPQPLHRLPCHLPWCVSRENHEQHGVCRRRPGAGCLPG

SEQ ID NO: 88 - DNA, 1471 bp, Homo sapiens
tgacttggatgtagacctcgaccttcacaggactcttcattgctggttggcaatgatgtatcggccagatgtggtgagggctaggaaaagagtttgttgggaaccctgggttatcggcctcgtcatcttcatatccctgattgtcctggcagtgtgcattggactcactgttcattatgtgagatataatcaaaagaagacctacaattactatagcacattgtcatttacaactgacaaactatatgctgagtttggcagagaggcttctaacaattttacagaaatgagccagagacttgaatcaatggtgaaaaatgcattttataaatctccattaagggaagaatttgtcaagtctcaggttatcaagttcagtcaacagaagcatggagtgttggctcatatgctgttgatttgtagatttcactctactgaggatcctgaaactgtagataaaattgttcaacttgttttacatgaaaagctgcaagatgctgtaggaccccctaaagtagatcctcactcagttaaaattaaaaaaatcaacaagacagaaacagacagctatctaaaccattgctgcggaacacgaagaagtaaaactctaggtcagagtctcaggatcgttggtgggacagaagtagaagagggtgaatggccctggcaggctagcctgcagtgggatgggagtcatcgctgtggagcaaccttaattaatgccacatggcttgtgagtgctgctcactgttttacaacatataagaaccctgccagatggactgcttcctttggagtaacaataaaaccttcgaaaatgaaacggggtctccggagaataattgtccatgaaaaatacaaacacccatcacatgactatgatatttctcttgcagagctttctagccctgttccctacacaaatgcagtacatagagtttgtctccctgatgcatcctatgagtttcaaccaggtgatgtgatgtttgtgacaggatttggagcactgaaaaatgatggttacagtcaaaatcatcttcgacaagcacaggtgactctcatagacgctacaacttgcaatgaacctcaagcttacaatgacgccataactcctagaatgttatgtgctggctccttagaaggaaaaacagatgcatgccagggtgactctggaggaccactggttagttcagatgctagagatatctggtaccttgctggaatagtgagctggggagatgaatgtgcgaaacccaacaagcctggtgtttatactagagttacggccttgcgggactggattacttcaaaaactggtatctaagagagaaaagcctcatggaacagataacatttttttttgttttttgggtgtggaggccatttttagagatacagaattggagaagacttgcaaaacagctagatttgactgatctcaataaactgtttgcttgatgcaaaaaaaaaa

SEQ ID NO: 89 - protein, 422 aa, Homo sapiens
MYRPDVVRARKRVCWEPWVIGLVIFISLIVLAVCIGLTVHYVRYNQKKTYNYYSTLSFTTDKLYAEFGREASNNFTEMSQRLESMVKNAFYKSPLREEFVKSQVIKFSQQKHGVLAHMLLICRFHSTEDPETVDKIVQLVLHEKLQDAVGPPKVDPHSVKIKKINKTETDSYLNHCCGTRRSKTLGQSLRIVGGTEVEEGEWPWQASLQWDGSHRCGATLINATWLVSAAHCFTTYKNPARWTASFGVTIKPSKMKRGLRRIIVHEKYKHPSHDYDISLAELSSPVPYTNAVHRVCLPDASYEFQPGDVMFVTGFGALKNDGYSQNHLRQAQVTLIDATTCNEPQAYNDAITPRMLCAGSLEGKTDACQGDSGGPLVSSDARDIWYLAGIVSWGDECAKPNKPGVYTRVTALRDWITSKTGI

SEQ ID NO: 90 - DNA, 1124 bp, Homo sapiens
ccatggcccttggggcctgtggcctcctgctgctcctggctgtgcccggtgtgtccctcaggactttgcagccagggtgtggccggccgcaggtttcggatgcaggcggccggatcgtggggggtcacgctgccccggccggcgcatggccatggcaggccagcctccgcctgcggaggatgcacgtgtgcggcgggtcactgctcagcccccagtgggtgctcacagctgcccactgcttctccgggtccctgaactcatccgactaccaggtgcacctgggggaactggagatcactttgtctccccacttctccaccgtgaggcagatcatcctgcactccagcccctcaggacagccggggaccagcggggacatcgccctggtggagctcagtgtccccgtgaccctctccagccggatcctgcccgtctgcctcccggaggcctcagatgacttctgccctgggatccggtgctgggtgaccggctggggctatacgcgggagggagagcctctgccacccccgtacagcctgcgggaggtgaaagtctccgtggtggacacagagacctgccgccgggactatcccggccccgggggcagcatccttcagcccgacatgctgtgtgcccggggccccggggatgcctgccaggacgactccggggggcctctggtctgccaggtgaacggtgcctgggtgcaggctggcattgtgagctggggtgagggctgcggccgccccaacaggccgggagtctacactcgtgtccctgcctacgtgaactggatccgccgccacatcacagcatcagggggctcagagtctgggtaccccaggctccccctcctggctggcttcttcctccccggcctcttccttctgctagtctcctgtgtcctgctggccaagtgcctgctgcacccatctgcggatggtactcccttccccgcccctgactgatggcaggaatccaagtgcatttcttaaataagttactatttattccgctccgccccctccctctcccttgagaagctgagtcttctgcatcagattattgcaacatttaacctgaatttaaaagcacacgaaacaaaaaaaaaaaaaaaaaaaaaa

SEQ ID NO: 91 - protein, 321 aa, Homo sapiens
MALGACGLLLLLAVPGVSLRTLQPGCGRPQVSDAGGRIVGGHAAPAGAWPWQASLRLRRMHVCGGSLLSPQWVLTAAHCFSGSLNSSDYQVHLGELEITLSPHFSTVRQIILHSSPSGQPGTSGDIALVELSVPVTLSSRILPVCLPEASDDFCPGIRCWVTGWGYTREGEPLPPPYSLREVKVSVVDTETCRRDYPGPGGSILQPDMLCARGPGDACQDDSGGPLVCQVNGAWVQAGIVSWGEGCGRPNRPGVYTRVPAYVNWIRRHITASGGSESGYPRLPLLAGFFLPGLFLLLVSCVLLAKCLLHPSADGTPFPAPD

SEQ ID NO: 92 - DNA, 1459 bp, Homo sapiens
gcacctagcagatcccaagctggggaatgccagttctggcaccaaccttcctgctccctgctggggcctctgctcccccatctctcaggagtcgaaagtgagaaagcaagacatcaaggagggacctgtgccctgctccacatcctcccacctgccgcccgcagagcctgcaggccccgcccccctcgtctctggtccctacctctctgctgtgtcttcatgtccctgagggtcttgggctctgggacctggccctcagcccctaaaatgttcctcctgctgacagcacttcaagtcctggctatagccatgacacagagccaagaggatgagaacaagataattggtggccatacgtgcacccggagctcccagccgtggcaggcggccctgctggcgggtcccaggcgccgcttcctctgcggaggcgccctgctttcaggccagtgggtcatcactgctgctcactgcggccgcccgatccttcaggttgccctgggcaagcacaacctgaggaggtgggaggccacccagcaggtgctgcgcgtggttcgtcaggtgacgcaccccaactacaactcccggacccacgacaacgacctcatgctgctgcagctacagcagcccgcacggatcgggagggcagtcaggcccattgaggtcacccaggcctgtgccagccccgggacctcctgccgagtgtcaggctggggaactatatccagccccatcgccaggtaccccgcctctctgcaatgcgtgaacatcaacatctccccggatgaggtgtgccagaaggcctatcctagaaccatcacgcctggcatggtctgtgcaggagttccccagggcgggaaggactcttgtcagggtgactctgggggacccctggtgtgcagaggacagctccagggcctcgtgtcttggggaatggagcgctgcgccctgcctggctaccccggtgtctacaccaacctgtgcaagtacagaagctggattgaggaaacgatgcgggacaaatgatggtcttcacggtgggatggacctcgtcagctgcccaggccctcctctctctactcaggacccaggagtccaggccccagcccctcctccctcagacccaggagtccaggcccccagcccctcctccctcagacccgggagtccaggcccccagcccctcctccctcagacccaggagccccagtccccagcatcctgatctttactccggctctgatctctcctttcccagagcagttgcttcaggcgttttctccccaccaagcccccacccttgctgtgtcaccatcactactcaagaccggaggcacagagggcaggagcacagaccccttaaaccggcattgtattccaaagacgacaatttttaacacgcttagtgtctctaaaaaccgaataaataatgacaataaaaatggaatcatcctaaattgta

SEQ ID NO: 93 - protein, 251 aa, Homo sapiens
MFLLLTALQVLAIAMTQSQEDENKIIGGHTCTRSSQPWQAALLAGPRRRFLCGGALLSGQWVITAAHCGRPILQVALGKHNLRRWEATQQVLRVVRQVTHPNYNSRTHDNDLMLLQLQQPARIGRAVRPIEVTQACASPGTSCRVSGWGTISSPIARYPASLQCVNINISPDEVCQKAYPRTITPGMVCAGVPQGGKDSCQGDSGGPLVCRGQLQGLVSWGMERCALPGYPGVYTNLCKYRSWIEETMRDK

SEQ ID NO: 94 - DNA, 3008 bp, Homo sapiens
cctgaatccttggagactgacatttttcccccctaaaggcatagacaacaaaagaaattttattgagaggaaaacacaagtccttaaactgcaaagatgtttgccaggatgtctgatctccatgttctgctgttaatggctctggtgggaaagacagcctgtgggttctccctgatgtctttattggaaagcctggacccagactggacccctgaccagtatgattacagctacgaggattataatcaggaagagaacaccagtagcacacttacccacgctgagaatcctgactggtactacactgaggaccaagctgatccatgccagcccaacccctgtgaacacggtggggactgcctcgtccatgggagcaccttcacatgcagctgcctggctcctttctctgggaataagtgtcagaaagtgcaaaatacgtgcaaggacaacccatgtggccggggccaatgtctcattacccagagtcctccctactaccgctgtgtctgtaaacacccttacacaggtcccagctgctcccaagtggttcctgtatgcaggccaaacccctgccagaatggggctacctgctcccggcataagcggagatccaagttcacctgtgcctgtcccgaccagttcaaggggaaattctgtgaaataggttctgatgactgctatgttggcgatggctactcttaccgagggaaaatgaataggacagtcaaccagcatgcgtgcctttactggaactcccacctcctcttgcaggagaattacaacatgtttatggaggatgctgaaacccatgggattggggaacacaatttctgcagaaacccagatgcggacgaaaagccctggtgctttattaaagttaccaatgacaaggtgaaatgggaatactgtgatgtctcagcctgctcagcccaggacgttgcctacccagaggaaagccccactgagccatcaaccaagcttccggggtttgactcctgtggaaagactgagatagcagagaggaagatcaagagaatctatggaggctttaagagcacggcgggcaagcacccatggcaggcgtccctccagtcctcgctgcctctgaccatctccatgccccagggccacttctgtggtggggcgctgatccacccctgctgggtgctcactgctgcccactgcaccgacataaaaaccagacatctaaaggtggtgctaggggaccaggacctgaagaaagaagaatttcatgagcagagctttagggtggagaagatattcaagtacagccactacaatgaaagagatgagattccccacaatgatattgcattgctcaagttaaagccagtggatggtcactgtgctctagaatccaaatacgtgaagactgtgtgcttgcctgatgggtcctttccctctgggagtgagtgccacatctctggctggggtgttacagaaacaggaaaagggtcccgccagctcctggatgccaaagtcaagctgattgccaacactttgtgcaactcccgccaactctatgaccacatgattgatgacagtatgatctgtgcaggaaatcttcagaaacctgggcaagacacctgccagggtgactctggaggccccctgacctgtgagaaggacggcacctactacgtctatgggatagtgagctggggcctggagtgtgggaagaggccaggggtctacacccaagttaccaaattcctgaattggatcaaagccaccatcaaaagtgaaagtggcttctaaggtactgtcttctggacctcagagcccactctccttggcaccctgacaccgggaggcctcatggccaacaatggacacctccagagcctccaggggaccacacagtagactatccctactctaagcagagacaactgccacccagcctgggccttcccagaccagcatttgcacaatatcaccaggcttcttctgcctcccttggtaacccaaggaatgatggaatcaacacaacatagtatgtttgctttccttacccaattgtaccttctagaaaatcagtgttcacagagactgcctccaccacaggcatcctgcaaatgcagactccagaatccccagcatcagcgggaaccaccatcacatctttattcctcagcccagacactcgaggcactcaacagaatcagccatccacgtctaggtatcagagaggaccacaaatacaacattctccatctgctttcagagttattattttaataaaggaagatctgggatgggctggtgggccattccagcttgccgaaatcaaagccatctgaagcctgtctctggtgaacaaacttcctctctggcctctcaggaatcagggtggcatggctcacaacagcagggccttcttctttttgacgtgcagaatctcagtggcatctgggttcacctccccactctgatgatctccagcctccactgcttctgccccccgctgctgaaatcaaacataccccaagttaaaatgaagctcccccacccccactcccggccccggttcccacaggacacgctaagaagcacagggagcatttaacaggctcaccctccctttccttttcccctcttctaccctccccaagaaaaagggccttcaaggcaggaatgagaaagcaaagccaatctctcatttagacctggcttctttcttctgaacaaagtagggttcaaaatgcagactgtcatatccagcgagtccctgaccctttctgcgaatgtaacgagcaagcagtcagcacagcctgggctgccctggcccgggattgatgtagccccggtaggtttgcctctgcagaactaatggctgtgacttcagagaaagccctgcaggaagtttaacctgcgtgtcatctgcctggtcatctcagacccatgaaattaggcgccttgtttgagctgcgtttcacacttctttagagctagctgacctttggccaaaaataaactttgaaaag

SEQ ID NO: 95 - protein, 560 aa, Homo sapiens
MFARMSDLHVLLLMALVGKTACGFSLMSLLESLDPDWTPDQYDYSYEDYNQEENTSSTLTHAENPDWYYTEDQADPCQPNPCEHGGDCLVHGSTFTCSCLAPFSGNKCQKVQNTCKDNPCGRGQCLITQSPPYYRCVCKHPYTGPSCSQVVPVCRPNPCQNGATCSRHKRRSKFTCACPDQFKGKFCEIGSDDCYVGDGYSYRGKMNRTVNQHACLYWNSHLLLQENYNMFMEDAETHGIGEHNFCRNPDADEKPWCFIKVTNDKVKWEYCDVSACSAQDVAYPEESPTEPSTKLPGFDSCGKTEIAERKIKRIYGGFKSTAGKHPWQASLQSSLPLTISMPQGHFCGGALIHPCWVLTAAHCTDIKTRHLKVVLGDQDLKKEEFHEQSFRVEKIFKYSHYNERDEIPHNDIALLKLKPVDGHCALESKYVKTVCLPDGSFPSGSECHISGWGVTETGKGSRQLLDAKVKLIANTLCNSRQLYDHMIDDSMICAGNLQKPGQDTCQGDSGGPLTCEKDGTYYVYGIVSWGLECGKRPGVYTQVTKFLNWIKATIKSESGF

SEQ ID NO: 96 - DNA, 2124 bp, Homo sapiens
aatcaagctgcccaaagtcccccaatcactcctggaatacacagagagaggcagcagcttgctcagcggacaaggatgctgggcgtgagggaccaaggcctgccctgcactcgggcctcctccagccagtgctgaccagggacttctgacctgctggccagccaggacctgtgtggggaggccctcctgctgccttggggtgacaatctcagctccaggctacagggagaccgggaggatcacagagccagcatgttacaggatcctgacagtgatcaacctctgaacagcctcgatgtcaaacccctgcgcaaaccccgtatccccatggagaccttcagaaaggtggggatccccatcatcatagcactactgagcctggcgagtatcatcattgtggttgtcctcatcaaggtgattctggataaatactacttcctctgcgggcagcctctccacttcatcccgaggaagcagctgtgtgacggagagctggactgtcccttgggggaggacgaggagcactgtgtcaagagcttccccgaagggcctgcagtggcagtccgcctctccaaggaccgatccacactgcaggtgctggactcggccacagggaactggttctctgcctgtttcgacaacttcacagaagctctcgctgagacagcctgtaggcagatgggctacagcagcaaacccactttcagagctgtggagattggcccagaccaggatctggatgttgttgaaatcacagaaaacagccaggagcttcgcatgcggaactcaagtgggccctgtctctcaggctccctggtctccctgcactgtcttgcctgtgggaagagcctgaagaccccccgtgtggtgggtggggaggaggcctctgtggattcttggccttggcaggtcagcatccagtacgacaaacagcacgtctgtggagggagcatcctggacccccactgggtcctcacggcagcccactgcttcaggaaacataccgatgtgttcaactggaaggtgcgggcaggctcagacaaactgggcagcttcccatccctggctgtggccaagatcatcatcattgaattcaaccccatgtaccccaaagacaatgacatcgccctcatgaagctgcagttcccactcactttctcaggcacagtcaggcccatctgtctgcccttctttgatgaggagctcactccagccaccccactctggatcattggatggggctttacgaagcagaatggagggaagatgtctgacatactgctgcaggcgtcagtccaggtcattgacagcacacggtgcaatgcagacgatgcgtaccagggggaagtcaccgagaagatgatgtgtgcaggcatcccggaagggggtgtggacacctgccagggtgacagtggtgggcccctgatgtaccaatctgaccagtggcatgtggtgggcatcgttagctggggctatggctgcgggggcccgagcaccccaggagtatacaccaaggtctcagcctatctcaactggatctacaatgtctggaaggctgagctgtaatgctgctgcccctttgcagtgctgggagccgcttccttcctgccctgcccacctggggatcccccaaagtcagacacagagcaagagtccccttgggtacacccctctgcccacagcctcagcatttcttggagcagcaaagggcctcaattcctgtaagagaccctcgcagcccagaggcgcccagaggaagtcagcagccctagctcggccacacttggtgctcccagcatcccagggagagacacagcccactgaacaaggtctcaggggtattgctaagccaagaaggaactttcccacactactgaatggaagcaggctgtcttgtaaaagcccagatcactgtgggctggagaggagaaggaaagggtctgcgccagccctgtccgtcttcacccatccccaagcctactagagcaagaaaccagttgtaatataaaatgcactgccctactgttggtatgactaccgttacctactgttgtcattgttattacagctatggccactattattaaagagctgtgtaacatctctggaaaaaaaaaaaaaaaa

SEQ ID NO: 97 - protein, 437 aa, Homo sapiens
MLQDPDSDQPLNSLDVKPLRKPRIPMETFRKVGIPIIIALLSLASIIIVVVLIKVILDKYYFLCGQPLHFIPRKQLCDGELDCPLGEDEEHCVKSFPEGPAVAVRLSKDRSTLQVLDSATGNWFSACFDNFTEALAETACRQMGYSSKPTFRAVEIGPDQDLDVVEITENSQELRMRNSSGPCLSGSLVSLHCLACGKSLKTPRVVGGEEASVDSWPWQVSIQYDKQHVCGGSILDPHWVLTAAHCFRKHTDVFNWKVRAGSDKLGSFPSLAVAKIIIIEFNPMYPKDNDIALMKLQFPLTFSGTVRPICLPFFDEELTPATPLWIIGWGFTKQNGGKMSDILLQASVQVIDSTRCNADDAYQGEVTEKMMCAGIPEGGVDTCQGDSGGPLMYQSDQWHVVGIVSWGYGCGGPSTPGVYTKVSAYLNWIYNVWKAEL

SEQ ID NO: 98 - DNA, 1983 bp, Homo sapiens
aatcaagctgcccaaagtcccccaatcactcctggaatacacagagagaggcagcagcttgctcagcggacaaggatgctgggcgtgagggaccaaggcctgccctgcactcgggcctcctccagccagtgctgaccagggacttctgacctgctggccagccaggacctgtgtggggaggccctcctgctgccttggggtgacaatctcagctccaggctacagggagaccgggaggatcacagagccagcatggatcctgacagtgatcaacctctgaacagcctcgatgtcaaacccctgcgcaaaccccgtatccccatggagaccttcagaaaggtggggatccccatcatcatagcactactgagcctggcgagtatcatcattgtggttgtcctcatcaaggtgattctggataaatactacttcctctgcgggcagcctctccacttcatcccgaggaagcagctgtgtgacggagagctggactgtcccttgggggaggacgaggagcactgtgtcaagagcttccccgaagggcctgcagtggcagtccgcctctccaaggaccgatccacactgcaggtgctggactcggccacagggaactggttctctgcctgtttcgacaacttcacagaagctctcgctgagacagcctgtaggcagatgggctacagcagcaaacccactttcagagctgtggagattggcccagaccaggatctggatgttgttgaaatcacagaaaacagccaggagcttcgcatgcggaactcaagtgggccctgtctctcaggctccctggtctccctgcactgtcttgcctgtgggaagagcctgaagaccccccgtgtggtgggtggggaggaggcctctgtggattcttggccttggcaggtcagcatccagtacgacaaacagcacgtctgtggagggagcatcctggacccccactgggtcctcacggcagcccactgcttcaggaaacataccgatgtgttcaactggaaggtgcgggcaggctcagacaaactgggcagcttcccatccctggctgtggccaagatcatcatcattgaattcaaccccatgtaccccaaagacaatgacatcgccctcatgaagctgcagttcccactcactttctcaggcacagtcaggcccatctgtctgcccttctttgatgaggagctcactccagccaccccactctggatcattggatggggctttacgaagcagaatggagggtgacagtggtgggcccctgatgtaccaatctgaccagtggcatgtggtgggcatcgttagctggggctatggctgcgggggcccgagcaccccaggagtatacaccaaggtctcagcctatctcaactggatctacaatgtctggaaggctgagctgtaatgctgctgcccctttgcagtgctgggagccgcttccttcctgccctgcccacctggggatcccccaaagtcagacacagagcaagagtccccttgggtacacccctctgcccacagcctcagcatttcttggagcagcaaagggcctcaattcctgtaagagaccctcgcagcccagaggcgcccagaggaagtcagcagccctagctcggccacacttggtgctcccagcatcccagggagagacacagcccactgaacaaggtctcaggggtattgctaagccaagaaggaactttcccacactactgaatggaagcaggctgtcttgtaaaagcccagatcactgtgggctggagaggagaaggaaagggtctgcgccagccctgtccgtcttcacccatccccaagcctactagagcaagaaaccagttgtaatataaaatgcactgccctactgttggtatgactaccgttacctactgttgtcattgttattacagctatggccactattattaaagagctgtgtaacatctctggaaaaaaaaaaaaaaaaaaaaaaaa

SEQ ID NO: 99 - protein, 335 aa, Homo sapiens
MDPDSDQPLNSLDVKPLRKPRIPMETFRKVGIPIIIALLSLASIIIVVVLIKVILDKYYFLCGQPLHFIPRKQLCDGELDCPLGEDEEHCVKSFPEGPAVAVRLSKDRSTLQVLDSATGNWFSACFDNFTEALAETACRQMGYSSKPTFRAVEIGPDQDLDVVEITENSQELRMRNSSGPCLSGSLVSLHCLACGKSLKTPRVVGGEEASVDSWPWQVSIQYDKQHVCGGSILDPHWVLTAAHCFRKHTDVFNWKVRAGSDKLGSFPSLAVAKIIIIEFNPMYPKDNDIALMKLQFPLTFSGTVRPICLPFFDEELTPATPLWIIGWGFTKQNGG

SEQ ID NO: 100 - DNA, 855 bp, Homo sapiens
aggcccacgatgctcctccttgctccccagatgctgagcctgctgctgctggcgctgcccgtcctggcgagcccggcctacgtggcccctgccccaggccaggccctgcagcaaacgggcattgttggggggcaggaggcccccaggagcaagtggccctggcaggtgagcctgagagtccgcggcccatactggatgcacttctgcgggggctccctcatccacccccagtgggtgctaaccgcggcgcactgcgtggaaccggacatcaaggatctggccgccctcagggtgcaactgcgggagcagcacctctactaccaggaccagctgctgccggtcagcaggatcatcgtgcacccacagttctacatcatccagaccggggcggacatcgccctgctggagctggaggagcccgtgaacatctccagccacatccacacggtcacgctgccccctgcctcggagaccttccccccggggatgccgtgctgggtcactggctggggcgacgtggacaataatgtgcacctgccgccgccatacccgctgaaggaggtggaagtccccgtagtggaaaaccacctttgcaacgcggaatatcacaccggcctccatacgggccacagctttcaaatcgtccgcgatgacatgctgtgtgcggggagcgaaaatcacgactcctgccagggtgactctggagggcccctggtctgcaaggtgaatggcacctaactgcaggcgggcgtggtcagctgggaggagagctgtgcccagcccaaccggcctggcatctacacccgtgtcacctactacttggactggatccaccactatgtccccaagaagccc

SEQ ID NO: 101 - protein, 242 aa, Homo sapiens
MLLLAPQMLSLLLLALPVLASPAYVAPAPGQALQQTGIVGGQEAPRSKWPWQVSLRVRGPYWMHFCGGSLIHPQWVLTAAHCVEPDIKDLAALRVQLREQHLYYQDQLLPVSRIIVHPQFYIIQTGADIALLELEEPVNISSHIHTVTLPPASETFPPGMPCWVTGWGDVDNNVHLPPPYPLKEVEVPVVENHLCNAEYHTGLHTGHSFQIVRDDMLCAGSENHDSCQGDSGGPLVCKVNGT

SEQ ID NO: 102 - DNA, 1462 bp, Homo sapiens
ctgtctcaaaaaattaaaaaaaataataataataataatgaatgaagctggacggacttcgcgtgcaccgcggtcagctcggggtctgctggggggtctgggtcagctcagggtccaggaaccgaggccaacggcaccccgtgctgcgctggggtgaggggtctgccctggggtctcggggttcagggctaggtcacggaggagtcggctctgggcgcttccttcctgaggagaggagctgggcaggccgggccgacgggttgggccgcatagccgggcctgtgctcatctccagcataaaactccacttcatggagcctgcacctcgctcgtgctccaacgcttctgccaccgccgaccacggccctgcgccccagccaggcctgaggacatgaggcggccggcggcggtgccgctcctgctgctgctgtgttttgggtctcagagggccaaggcagcaacagcctgtggtcgccccaggatgctgaaccgaatggtgggcgggcaggacacgcaggagggcgagtggccctggcaagtcagcatccagcgcaacggaagccacttctgcgggggcagcctcatcgcggagcagtgggtcctgacggctgcgcactgcttccgcaacacctctgagacgtccctgtaccaggtcctgctgggggcaaggcagctagtgcagccgggaccacacgctatgtatgcccgggtgaggcaggtggagagcaaccccctgtaccagggcacggcctccagcgctgacgtggccctggtggagctggaggcaccagtgcccttcaccaattacatcctccccgtgtgcctgcctgacccctcggtgatctttgagacgggcatgaactgctgggtcactggctggggcagccccagtgaggaagacctcctgcccgaaccgcggatcctgcagaaactcgctgtgcccatcatcgacacacccaagtgcaacctgctctacagcaaagacaccgagtttggctaccaacccaaaaccatcaagaatgacatgctgtgcgccggcttcgaggagggcaagaaggatgcctgcaagggcgactcgggcggccccctggtgtgcctcgtgggtcagtcgtggctgcaggcgggggtgatcagctggggtgagggctgtgcccgccagaaccgcccaggtgtctacatccgtgtcaccgcccaccacaactggatccatcggatcatccccaaactgcagttccagccagcgaggttgggcggccagaagtgagacccccggggccaggagccccttgagcagagctctgcacccagcctgcccgcccacaccatcctgctggtcctcccagcgctgctgttgcacctgtgagccccaccagactcatttgtaaatagcgctccttcctcccctctcaaatacccttattttatttatgtttctcccaataaaaacccagcctgtgtgcca

SEQ ID NO: 103 - protein, 290 aa, Homo sapiens
MRRPAAVPLLLLLCFGSQRAKAATACGRPRMLNRMVGGQDTQEGEWPWQVSIQRNGSHFCGGSLIAEQWVLTAAHCFRNTSETSLYQVLLGARQLVQPGPHAMYARVRQVESNPLYQGTASSADVALVELEAPVPFTNYILPVCLPDPSVIFETGMNCWVTGWGSPSEEDLLPEPRILQKLAVPIIDTPKCNLLYSKDTEFGYQPKTIKNDMLCAGFEEGKKDACKGDSGGPLVCLVGQSWLQAGVISWGEGCARQNRPGVYIRVTAHHNWIHRIIPKLQFQPARLGGQK

SEQ ID NO: 104 - DNA, 1755 bp, Homo sapiens
ccaggacttccgtctgagatgggatttctggacagaacaatggagcgcagaagctccagcaacgtgtgctctgcagggagcccagaccagagtccaagccctaggcagtgccacccttacccagcccagccttgaagacagaatgagaggggtttcctgtctccaggtcctgctccttctggtgctgggagctgctgggactcagggaaggaagtctgcagcctgcgggcagccccgcatgtccagtcggatcgttgggggccgggatggccgggacggagagtggccgtggcaggcgagcatccagcatcgtggggcacacgtgtgcggggggtcgctcatcgccccccagtgggtgctgacagcggcgcactgcttccccaggagggcactgccagctgagtaccgcgtgcgcctgggggcgctgcgtctgggctccacctcgccccgcacgctctcggtgcccgtgcgacgggtgctgctgcccccggactactccgaggacggggcccgcggcgacctggcactgctgcagctgcgtcgcccggtgcccctgagcgctcgcgtccaacccgtctgcctgcccgtgcccggcgcccgcccgccgcccggcacaccatgccgggtcaccggctggggcagcctccgcccaggagtgcccctcccagagtggcgaccgctacaaggagtaagggtgccgctgctggactcgcgcacctgcgacggcctctaccacgtgggcgcggacgtgccccaggctgagcgcattgtgctgcctgggagtctgtgtgccggctacccccagggccacaaggacgcctgccagggtgattctgggggacctctgacctgcctgcagtctgggagctgggtcctggtgggcgtggtgagctggggcaagggttgtgccctgcccaaccgtccaggggtctacaccagtgtggccacatatagcccctggattcaggctcgcgtcagcttctaatgctagccggtgaggctgacctggagccagctgctggggtccctcagcctcctggttcatccaggcacctgcctataccccacatcccttctgcctcgaggccaagatgcctaaaaaagctaaaggccaccccaccccccacccaccacctcctgcctcctctcctctttggggatcaccagctctgactccaccaaccctcatccaggaatctgccatgagtcccagggagtcacactccccactcccttcctggcttgtatttacttttcttggccctggccagggctgggcgcaaggcacgcagtgatgggcaaaccaattgctgcccatctggcctgtgtgcccatctttttctggagaaagtcagattcacagcatgacagagatttgacaccagggagatcctccatagctggctttgaggacacggggaccacagccatgagcggcctctaagagctgagagacagccggcagggaatcggaaccctcagacccacagccgcaaggcactggattctggcagcaccctgaaggagctgggaagtaagttcttccccagcctccagataagagccccgccggccaatcccttcatttcaacctaaagagaccctaagcagagaacctagctgagccactcctgacctacaaagttgtgacttaataaatgtgtgctttgaacccaaaaaaaaaaaaaaaaaaaaaaaaaaaaaaaaaaaaaaaaaaaaaaaaaaaaaaaaaaaaaaaaaaaaaaaaaaaaaaaa

SEQ ID NO: 105 - protein, 284 aa, Homo sapiens
MRGVSCLQVLLLLVLGAAGTQGRKSAACGQPRMSSRIVGGRDGRDGEWPWQASIQHPGAHVCGGSLIAPQWVLTAAHCFPRRALPAEYRVRLGALRLGSTSPRTLSVPVRRVLLPPDYSEDGARGDLALLQLRRPVPLSARVQPVCLPVPGARPPPGTPCRVTGWGSLRPGVPLPEWRPLQGVRVPLLDSRTCDGLYHVGADVPQAERIVLPGSLCAGYPQGHKDACQGDSGGPLTCLQSGSWVLVGVVSWGKGCALPNRPGVYTSVATYSPWIQARVTSNASR

SEQ ID NO: 106 - DNA, 321 bp, Homo sapiens
gcgctggtggcgggcggagtggagtccgcgcgcgggcgctggccatggcaggccagcctgcgcctgaggagacgccaccgatgtggagggagcctgctcagccgccgctgggtgctctcggctgcgcactgcttcgctccccagggtgactcaggtggacccttggtctgtgacaaggatggactgtggtatcaggttggaatcgtgagctggggaatggactgcggtcaacccaatcggcctggtgtctacaccaacatcagtgtgtacttccactggatccggagggtgatgtcccacagtacacccaggccaaacccc

SEQ ID NO: 107 - protein, 107 aa, Homo sapiens
ALVAGGVESARGRWPWQASLRLRRRHRCGGSLLSRRWVLSAAHCFAPQGDSGGPLVCDKDGLWYQVGIVSWGMDCGQPNRPGVYTNISVYFHWIRRVMSHSTPRPNP

SEQ ID NO: 108 - DNA, 2468 bp, Homo sapiens
accgggcaccggacggctcgggtactttcgttcttaattaggtcatgcccgtgtgagccaggaaagggctgtgtttatgggaagccagtaacactgtggcctactatctcttccgtggtgccatctacatttttgggactcgggaattatgaggtagaggtggaggcggagccggatgtcagaggtcctgaaatagtcaccatgggggaaaatgatccgcctgctgttgaagcccccttctcattccgatcgctttttggccttgatgatttgaaaataagtcctgttgcaccagatgcagatgctgttgctgcacagatcctgtcactgctgccattgaagttttttccaatcatcgtcattgggatcattgcattgatattagcactggccattggtctgggcatccacttcgactgctcagggaagtacagatgtcgctcatcctttaagtgtatcgagctgatagctcgatgtgacggagtctcggattgcaaagacggggaggacgagtaccgctgtgtccgggtgggtggtcagaatgccgtgctccaggtgttcacagctgcttcgtggaagaccatgtgctccgatgactggaagggtcactacgcaaatgttgcctgtgcccaactgggtttcccaagctatgtgagttcagataacctcagagtgagctcgctggaggggcagttccgggaggagtttgtgtccatcgatcacctcttgccagatgacaaggtgactgcattacaccactcagtatatgtgagggagggatgtgcctctggccacgtggttaccttgcagtgcacagcctgtggtcatagaaggggctacagctcacgcatcgtgggtggaaacatgtccttgctctcgcagtggccctggcaggccagccttcagttccagggctaccacctgtgcgggggctctgtcatcacgcccctgtggatcatcactgctgcacactgtgtttatgacttgtacctccccaagtcatggaccatccaggtgggtctagtttccctgttggacaatccagccccatcccacttggtggagaagattgtctaccacagcaagtacaagccaaagaggctgggcaatgacatcgcccttatgaagctggccgggccactcacgttcaatgaaatgatccagcctgtgtgcctgcccaactctgaagagaacttccccgatggaaaagtgtgctggacgtcaggatggggggccacagaggatggagcaggtgacgcctcccctgtcctgaaccacgcggccgtccctttgatttccaacaagatctgcaaccacagggacgtgtacggtggcatcatctccccctccatgctctgcgcgggctacctgacgggtggcgtggacagctgccagggggacagcggggggcccctggtgtgtcaagagaggaggctgtggaagttagtgggagcgaccagctttggcatcggctgcgcagaggtgaacaagcctggggtgtacacccgtgtcacctccttcctggactggatccacgagcagatggagagagacctaaaaacctgaagaggaaggggacaagtagccacctgagttcctgaggtgatgaagacagcccgatcctcccctggactcccgtgtaggaacctgcacacgagcagacacccttggagctctgagttccggcaccagtagcaggcccgaaagaggcacccttccatctgattccagcacaaccttcaagctgctttttgttttttgtttttttgaggtggagtctcgctctgttgcccaggctggagtgcagtggcgaaatccctgctcactgcagcctccgcttccctggttcaagcgattctcttgcctcagcttccccagtagctgggaccacaggtgcccgccaccacacccaactaatttttgtatttttagtagagacagggtttcaccatgttggccaggctgctctcaaacccctgacctcaaatgatgtgcctgcttcagcctcccacagtgctgggattacaggcatgggccaccacgcctagcctcacgctcctttctgatcttcactaagaacaaaagaagcagcaacttgcaagggcggcctttcccactggtccatctggttttctctccaggggtcttgcaaaattcctgacgagataagcagttatgtgacctcacgtgcaaagccaccaacagccactcagaaaagacgcaccagcccagaagtgcagaactgcagtcactgcacgttttcatctctagggaccagaaccaaacccaccctttctacttccaagacttattttcacatgtggggaggttaatctaggaatgactcgtttaaggcctattttcatgatttctttgtagcatttggtgcttgacgtattattgtcctttgattccaaataatatgtttccttccctcaaaaaaaaaaaaaaaaaaaaaaaaaaaaaaa

SEQ ID NO: 109 - protein, 454 aa, Homo sapiens
MGENDPPAVEAPFSFRSLFGLDDLKISPVAPDADAVAAQILSLLPLKFFPIIVIGIIALILALAIGLGIHFDCSGKYRCRSSFKCIELIARCDGVSDCKDGEDEYRCVRVGGQNAVLQVFTAASWKTMCSDDWKGHYANVACAQLGFPSYVSSDNLRVSSLEGQFREEFVSIDHLLPDDKVTALHHSVYVREGCASGHVVTLQCTACGHRRGYSSRIVGGNMSLLSQWPWQASLQFQGYHLCGGSVITPLWIITAAHCVYDLYLPKSWTIQVGLVSLLDNPAPSHLVEKIVYHSKYKPKRLGNDIALMKLAGPLTFNEMIQPVCLPNSEENFPDGKVCWTSGWGATEDGAGDASPVLNHAAVPLISNKICNHRDVYGGIISPSMLCAGYLTGGVDSCQGDSGGPLVCQERRLWKLVGATSFGIGCAEVNKPGVYTRVTSFLDWIHEQMERDLKT

SEQ ID NO: 110 - DNA, 2554 bp, Homo sapiens
gccacgttggattagggcccaccctaatgactcattttaactagatgactctgtaaagactctccaggccatctccaaataagatgccattctgaggtactaagagttaagacctcaacgtgtctttctgggggatactattcaacccatagcacatcccctcatcccccatggaataaccgggtcagaggtggagcaggtaggactgaactagagaatgtgccccttggtgggtggccctttccctaattaaggcacctttctttgggctgagacttctctgcaaagaggggagggggaaaggatagttaaatttgtaagtttcatggcactccaagtcaggttctggggctttctgctcttcctttttctggttatcagatgcagatgctgttgctgcacagatcctgtcactgctgccattgaagttttttccaatcatcgtcattgggatcattgcattgatattagcactggccattggtctgggcatccacttcgactgctcagggaagtacagatgtcgctcatcctttaagtgtatcgagctgatagctcgatgtgacggagtctcggattgcaaagacggggaggacgagtaccgctgtgtccgggtgggtggtcagaatgccgtgctccaggtgttcacagctgcttcgtggaagaccatgtgctccgatgactggaagggtcactacgcaaatgttgcctgtgcccaactgggtttcccaagctatgtgagttcagataacctcagagtgagctcgctggaggggcagttccgggaggagtttgtgtccatcgatcacctcttgccagatgacaaggtgactgcattacaccactcagtatatgtgagggagggatgtgcctctggccacgtggttaccttgcagtgcacagcctgtggtcatagaaggggctacagctcacgcatcgtgggtggaaacatgtccttgctctcgcagtggccctggcaggccagccttcagttccagggctaccacctgtgcgggggctctgtcatcacgcccctgtggatcatcactgctgcacactgtgtttatgacttgtacctccccaagtcatggaccatccaggtgggtctagtttccctgttggacaatccagccccatcccacttggtggagaagattgtctaccacagcaagtacaagccaaagaggctgggcaatgacatcgcccttatgaagctggccgggccactcacgttcaatgaaatgatccagcctgtgtgcctgcccaactctgaagagaacttccccgatggaaaagtgtgctggacgtcaggatggggggccacagaggatggagcaggtgacgcctcccctgtcctgaaccacgcggccgtccctttgatttccaacaagatctgcaaccacagggacgtgtacggtggcatcatctccccctccatgctctgcgcgggctacctgacgggtggcgtggacagctgccagggggacagcggggggcccctggtgtgtcaagagaggaggctgtggaagttagtgggagcgaccagctttggcatcggctgcgcagaggtgaacaagcctggggtgtacacccgtgtcacctccttcctggactggatccacgagcagatggagagagacctaaaaacctgaagaggaaggggacaagtagccacctgagttcctgaggtgatgaagacagcccgatcctcccctggactcccgtgtaggaacctgcacacgagcagacacccttggagctctgagttccggcaccagtagcaggcccgaaagaggcacccttccatctgattccagcacaaccttcaagctgctttttgttttttgtttttttgaggtggagtctcgctctgttgcccaggctggagtgcagtggcgaaatccctgctcactgcagcctccgcttccctggttcaagcgattctcttgcctcagcttccccagtagctgggaccacaggtgcccgccaccacacccaactaatttttgtatttttagtagagacagggtttcaccatgttggccaggctgctctcaaacccctgacctcaaatgatgtgcctgcttcagcctcccacagtgctgggattacaggcatgggccaccacgcctagcctcacgctcctttctgatcttcactaagaacaaaagaagcagcaacttgcaagggcggcctttcccactggtccatctggttttctctccaggggtcttgcaaaattcctgacgagataagcagttatgtgacctcacgtgcaaagccaccaacagccactcagaaaagacgcaccagcccagaagtgcagaactgcagtcactgcacgttttcatctctagggaccagaaccaaacccaccctttctacttccaagacttattttcacatgtggggaggttaatctaggaatgactcgtttaaggcctattttcatgatttctttgtagcatttggtgcttgacgtattattgtcctttgattccaaataatatgtttccttccctcaaaaaaaaaaaaaaaaaaaaaaaaaaaaaaa

SEQ ID NO: 111 - protein, 327 aa, Homo sapiens
MCSDDWKGHYANVACAQLGFPSYVSSDNLRVSSLEGQFREEFVSIDHLLPDDKVTALHHSVYVREGCASGHVVTLQCTACGHRRGYSSRIVGGNMSLLSQWPWQASLQFQGYHLCGGSVITPLWIITAAHCVYDLYLPKSWTIQVGLVSLLDNPAPSHLVEKIVYHSKYKPKRLGNDIALMKLAGPLTFNEMIQPVCLPNSEENFPDGKVCWTSGWGATEDGAGDASPVLNHAAVPLISNKICNHRDVYGGIISPSMLCAGYLTGGVDSCQGDSGGPLVCQERRLWKLVGATSFGIGCAEVNKPGVYTRVTSFLDWIHEQMERDLKT

SEQ ID NO: 112 - DNA, 2135 bp, Homo sapiens
gcagggggacagttgttagtgttgcactctgaaagagctgttggttaattcctgccttcctcccttttcccagtccacttcgactgctcagggaagtacagatgtcgctcatcctttaagtgtatcgagctgatagctcgatgtgacggagtctcggattgcaaagacggggaggacgagtaccgctgtgtccgggtgggtggtcagaatgccgtgctccaggtgttcacagctgcttcgtggaagaccatgtgctccgatgactggaagggtcactacgcaaatgttgcctgtgcccaactgggtttcccaagctatgtgagttcagataacctcagagtgagctcgctggaggggcagttccgggaggagtttgtgtccatcgatcacctcttgccagatgacaaggtgactgcattacaccactcagtatatgtgagggagggatgtgcctctggccacgtggttaccttgcagtgcacagcctgtggtcatagaaggggctacagctcacgcatcgtgggtggaaacatgtccttgctctcgcagtggccctggcaggccagccttcagttccagggctaccacctgtgcgggggctctgtcatcacgcccctgtggatcatcactgctgcacactgtgtttatgacttgtacctccccaagtcatggaccatccaggtgggtctagtttccctgttggacaatccagccccatcccacttggtggagaagattgtctaccacagcaagtacaagccaaagaggctgggcaatgacatcgcccttatgaagctggccgggccactcacgttcaatgaaatgatccagcctgtgtgcctgcccaactctgaagagaacttccccgatggaaaagtgtgctggacgtcaggatggggggccacagaggatggagcaggtgacgcctcccctgtcctgaaccacgcggccgtccctttgatttccaacaagatctgcaaccacagggacgtgtacggtggcatcatctccccctccatgctctgcgcgggctacctgacgggtggcgtggacagctgccagggggacagcggggggcccctggtgtgtcaagagaggaggctgtggaagttagtgggagcgaccagctttggcatcggctgcgcagaggtgaacaagcctggggtgtacacccgtgtcacctccttcctggactggatccacgagcagatggagagagacctaaaaacctgaagaggaaggggacaagtagccacctgagttcctgaggtgatgaagacagcccgatcctcccctggactcccgtgtaggaacctgcacacgagcagacacccttggagctctgagttccggcaccagtagcaggcccgaaagaggcacccttccatctgattccagcacaaccttcaagctgctttttgttttttgtttttttgaggtggagtctcgctctgttgcccaggctggagtgcagtggcgaaatccctgctcactgcagcctccgcttccctggttcaagcgattctcttgcctcagcttccccagtagctgggaccacaggtgcccgccaccacacccaactaatttttgtatttttagtagagacagggtttcaccatgttggccaggctgctctcaaacccctgacctcaaatgatgtgcctgcttcagcctcccacagtgctgggattacaggcatgggccaccacgcctagcctcacgctcctttctgatcttcactaagaacaaaagaagcagcaacttgcaagggcggcctttcccactggtccatctggttttctctccaggggtcttgcaaaattcctgacgagataagcagttatgtgacctcacgtgcaaagccaccaacagccactcagaaaagacgcaccagcccagaagtgcagaactgcagtcactgcacgttttcatctctagggaccagaaccaaacccaccctttctacttccaagacttattttcacatgtggggaggttaatctaggaatgactcgtttaaggcctattttcatgatttctttgtagcatttggtgcttgacgtattattgtcctttgattccaaataatatgtttccttccctcaaaaaaaaaaaaaaaaaaaaaaaaaaaaaaa

SEQ ID NO: 113 - protein, 327 aa, Homo sapiens; identical to SEQ ID NO: 111

SEQ ID NO: 114 - DNA, 1359 bp, Homo sapiens
accgggcaccggacggctcgggtactttcgttcttaattaggtcatgcccgtgtgagccaggaaagggctgtgtttatgggaagccagtaacactgtggcctactatctcttccgtggtgccatctacatttttgggactcgggaattatgaggtagaggtggaggcggagccggatgtcagaggtcctgaaatagtcaccatgggggaaaatgatccgcctgctgttgaagcccccttctcattccgatcgctttttggccttgatgatttgaaaataagtcctgttgcaccagatgcagatgctgttgctgcacagatcctgtcactgctgccattgaagttttttccaatcatcgtcattgggatcattgcattgatattagcactggccattggtctgggcatccacttcgactgctcagggaagtacagatgtcgctcatcctttaagtgtatcgagctgatagctcgatgtgacggagtctcggattgcaaagacggggaggacgagtaccgctgtgtccgggtgggtggtcagaatgccgtgctccaggtgttcacagctgcttcgtggaagaccatgtgctccgatgactggaagggtcactacgcaaatgttgcctgtgcccaactgggtttcccaagctatgtgagttcagataacctcagagtgagctcgctggaggggcagttccgggaggagtttgtgtccatcgatcacctcttgccagatgacaaggtgactgcattacaccactcagtatatgtgagggagggatgtgcctctggccacgtggttaccttgcagtgcacagcctgtggtcatagaaggggctacagctcacgcatcgtgggtggaaacatgtccttgctctcgcagtggccctggcaggccagccttcagttccagggctaccacctgtgcgggggctctgtcatcacgcccctgtggatcatcactgctgcacactgtgtttatgacttgtacctccccaagtcatggaccatccaggtgggtctagtttccctgttggacaatccagccccatcccacttggtggagaagattgtctaccacagcaagtacaagccaaagaggctgggcaatgacatcgcccttatgaagctggccgggccactcacgttcaatggtacatctgggtctctatgtggttctgcagctcttcctttgtttcaagaggatttgcaattgctcattgaagcattcttatgatggctgctttataatccttgtcagatattaataattccaactcctgattcatgttggtgttggcatcagttgattatcttttctcattaaaattgtgatgctcctaaaaaaaaaaaaaaaaaa

SEQ ID NO: 115 - protein, 344 aa, Homo sapiens
MGENDPPAVEAPFSFRSLFGLDDLKISPVAPDADAVAAQILSLLPLKFFPIIVIGIIALILALAIGLGIHFDCSGKYRCRSSFKCIELIARCDGVSDCKDGEDEYRCVRVGGQNAVLQVFTAASWKTMCSDDWKGHYANVACAQLGFPSYVSSDNLRVSSLEGQFREEFVSIDHLLPDDKVTALHHSVYVREGCASGHVVTLQCTACGHRRGYSSRIVGGNMSLLSQWPWQASLQFQGYHLCGGSVITPLWIITAAHCVYDLYLPKSWTIQVGLVSLLDNPAPSHLVEKIVYHSKYKPKRLGNDIALMKLAGPLTFNGTSGSLCGSAALPLFQEDLQLLIEAFL

SEQ ID NO: 116 - DNA, 1191 bp, Homo sapiens
actgcagccgaaccctggtccctcctccacaatgtggcttctcctcactctctccttcctgctggcatccacagcagcccaggatggtgacaagttgctggaaggtgacgagtgtgcaccccactcccagccatggcaagtggctctctacgagcgtggacgctttaactgtggcgcttccctcatctccccacactgggtgctgtctgcggcccactgccaaagccgcttcatgagagtgcgcctgggagagcacaacctgcgcaagcgcgatggcccagagcaactacggaccacgtctcgggtcattccacacccgcgctacgaagcgcgcagccaccgcaacgacatcatgttgctgcgcctagtccagcccgcacgcctgaacccccagtgagtctcccagatacgttgcattgtgccaacatcagcattatctcggacacatcttgtgacaagagctacccagggcgcctgacaaacaccatggtgtgtgcaggcgcggagggcagaggcgcagaatcctgtgagggtgactctgggggacccctggtctgtgggggcatcctgcagggcattgtgtcctggggtgacgtcccttgtgacaacaccaccaagcctggtgtctataccaaagtctgccactacttggagtggatcagggaaaccatgaagaggaactgactattctagcctatctcctgtgcccctgactgagcagaagcccccacagctggccagcagccccgcctgacatggaacagaacggagccatcccccaagaccctgtccaaggcccagatgttagccaaggacttgtcccacctgaggacaaagctggcgctcaaggtcacctgtttaatgccaagataacaaagcgctgatccaagttgctctgtaggaatttctgtgacttttttctggggtcaaagagaaaccccgagacactgtacactgttccttttcacccaccaccccgatccctaggtgaggagaagcggcttgaagcagggctccattcattcaacacacatgaccacccgtgtgatcttgaacaagaggcccaatctcacttcgccttggtttccttatctgtaaaatgagaccatcttattgctgacttcaaagggctgttgtgaggattaaatgagatgattcgtctgaactgattaaaatcgtgtctggcactga

SEQ ID NO: 117 - protein, 121 aa, Homo sapiens
MWLLLTLSFLLASTAAQDGDKLLEGDECAPHSQPWQVALYERGRFNCGASLISPHWVLSAAHCQSRFMRVRLGEHNLRKRDGPEQLRTTSRVIPHPRYEARSHRNDIMLLRLVQPARLNPQ

SEQ ID NO: 118 - DNA, 1172 bp, Homo sapiens
actgcagccgaaccctggtccctcctccacaatgtggcttctcctcactctctccttcctgctggcatccacagcagcccaggatggtgacaagttgctggaaggtgacgagtgtgcaccccactcccagccatggcaagtggctctctacgagcgtggacgctttaactgtggcgcttccctcatctccccacactgggtgctgtctgcggcccactgccaaagccgcttcatgagagtgcgcctgggagagcacaacctgcgcaagcgcgatggcccagagcaactacggaccacgtctcgggtcattccacacccgcgctacgaagcgcgcagccaccgcaacgacatcatgttgctgcgcctagtccagcccgcacgcctgaacccccaggtgcgccccgcggtgctacccacgcgttgcccccacccgggggaggcctgtgtggtgtctggctggggcctggtgtcccacaacgagcctgggaccgctgggagcccccggtcacaagggtgactctgggggacccctggtctgtgggggcatcctgcagggcattgtgtcctggggtgacgtcccttgtgacaacaccaccaagcctggtgtctataccaaagtctgccactacttggagtggatcagggaaaccatgaagaggaactgactattctagcctatctcctgtgcccctgactgagcagaagcccccacagctggccagcagccccgcctgacatggaacagaacggagccatcccccaagaccctgtccaaggcccagatgttagccaaggacttgtcccacctgaggacaaagctggcgctcaaggtcacctgtttaatgccaagataacaaagcgctgatccaagttgctctgtaggaatttctgtgacttttttctggggtcaaagagaaaccccgagacactgtacactgttccttttcacccaccaccccgatccctaggtgaggagaagcggcttgaagcagggctccattcattcaacacacatgaccacccgtgtgatcttgaacaagaggcccaatctcacttcgccttggtttccttatctgtaaaatgagaccatcttattgctgacttcaaagggctgttgtgaggattaaatgagatgattcgtctgaactgattaaaatcgtgtctggcactga

SEQ ID NO: 119 - protein, 161 aa, Homo sapiens
MWLLLTLSFLLASTAAQDGDKLLEGDECAPHSQPWQVALYERGRFNCGASLISPHWVLSAAHCQSRFMRVRLGEHNLRKRDGPEQLRTTSRVIPHPRYEARSHRNDIMLLRLVQPARLNPQVRPAVLPTRCPHPGEACVVSGWGLVSHNEPGTAGSPRSQG

SEQ ID NO: 120 - DNA, 1054 bp, Homo sapiens
actgcagccgaaccctggtccctcctccacaatgtggcttctcctcactctctccttcctgctggcatccacagcagcccaggatggtgacaagttgctggaaggtgacgagtgtgcaccccactcccagccatggcaagtggctctctacgagcgtggacgctttaactgtggcgcttccctcatctccccacactgggtgctgtctgcggcccactgccaaagccgcttcatgagagtgcgcctgggagagcacaacctgcgcaagcgcgatggcccagagcaactacggaccacgtctcgggtcattccacacccgcgctacgaagcgcgcagccaccgcaacgacatcatgttgctgcgcctagtccagcccgcacgcctgaacccccagggtgactctgggggacccctggtctgtgggggcatcctgcagggcattgtgtcctggggtgacgtcccttgtgacaacaccaccaagcctggtgtctataccaaagtctgccactacttggagtggatcagggaaaccatgaagaggaactgactattctagcctatctcctgtgcccctgactgagcagaagcccccacagctggccagcagccccgcctgacatggaacagaacggagccatcccccaagaccctgtccaaggcccagatgttagccaaggacttgtcccacctgaggacaaagctggcgctcaaggtcacctgtttaatgccaagataacaaagcgctgatccaagttgctctgtaggaatttctgtgacttttttctggggtcaaagagaaaccccgagacactgtacactgttccttttcacccaccaccccgatccctaggtgaggagaagcggcttgaagcagggctccattcattcaacacacatgaccacccgtgtgatcttgaacaagaggcccaatctcacttcgccttggtttccttatctgtaaaatgagaccatcttattgctgacttcaaagggctgttgtgaggattaaatgagatgattcgtctgaactgattaaaatcgtgtctggcactga

SEQ ID NO: 121 - protein, 171 aa, Homo sapiens
MWLLLTLSFLLASTAAQDGDKLLEGDECAPHSQPWQVALYERGRFNCGASLISPHWVLSAAHCQSRFMRVRLGEHNLRKRDGPEQLRTTSRVIPHPRYEARSHRNDIMLLRLVQPARLNPQGDSGGPLVCGGILQGIVSWGDVPCDNTTKPGVYTKVCHYLEWIRETMKRN

SEQ ID NO: 122 - DNA, 1309 bp, Homo sapiens
actgcagccgaaccctggtccctcctccacaatgtggcttctcctcactctctccttcctgctggcatccacagcagcccaggatggtgacaagttgctggaaggtgacgagtgtgcaccccactcccagccatggcaagtggctctctacgagcgtggacgctttaactgtggcgcttccctcatctccccacactgggtgctgtctgcggcccactgccaaagccgcttcatgagagtgcgcctgggagagcacaacctgcgcaagcgcgatggcccagagcaactacggaccacgtctcgggtcattccacacccgcgctacgaagcgcgcagccaccgcaacgacatcatgttgctgcgcctagtccagcccgcacgcctgaacccccaggtgcgccccgcggtgctacccacgcgttgcccccacccgggggaggcctgtgtggtgtctggctggggcctggtgtcccacaacgagcctgggaccgctgggagcccccggtcacaagtgagtctcccagatacgttgcattgtgccaacatcagcattatctcggacacatcttgtgacaagagctacccagggcgcctgacaaacaccatggtgtgtgcaggcgcggagggcagaggcgcagaatcctgtgagggtgactctgggggacccctggtctgtgggggcatcctgcagggcattgtgtcctggggtgacgtcccttgtgacaacaccaccaagcctggtgtctataccaaagtctgccactacttggagtggatcagggaaaccatgaagaggaactgactattctagcctatctcctgtgcccctgactgagcagaagcccccacagctggccagcagccccgcctgacatggaacagaacggagccatcccccaagaccctgtccaaggcccagatgttagccaaggacttgtcccacctgaggacaaagctggcgctcaaggtcacctgtttaatgccaagataacaaagcgctgatccaagttgctctgtaggaatttctgtgacttttttctggggtcaaagagaaaccccgagacactgtacactgttccttttcacccaccaccccgatccctaggtgaggagaagcggcttgaagcagggctccattcattcaacacacatgaccacccgtgtgatcttgaacaagaggcccaatctcacttcgccttggtttccttatctgtaaaatgagaccatcttattgctgacttcaaagggctgttgtgaggattaaatgagatgattcgtctgaactgattaaaatcgtgtctggcactga

SEQ ID NO: 123 - protein, 256 aa, Homo sapiens
MWLLLTLSFLLASTAAQDGDKLLEGDECAPHSQPWQVALYERGRFNCGASLISPHWVLSAAHCQSRFMRVRLGEHNLRKRDGPEQLRTTSRVIPHPRYEARSHRNDIMLLRLVQPARLNPQVRPAVLPTRCPHPGEACVVSGWGLVSHNEPGTAGSPRSQVSLPDTLHCANISIISDTSCDKSYPGRLTNTMVCAGAEGRGAESCEGDSGGPLVCGGILQGIVSWGDVPCDNTTKPGVYTKVCHYLEWIRETMKRN

SEQ ID NO: 124 - DNA, 920 bp, Homo sapiens
cagacaggaggcgtctgtagagatatcatgaacttcaacttagctttgttttccagagactggagctaaactgggctttcaacatcatcatgaagtttatcctcctctgggccctcttgaatctgactgttgctttggcctttaatccagattacacagtcagctccactcccccttacttggtctatttgaaatctgactacttgccctgcgctggagtcctgatccacccgctttgggtgatcacagctgcacactgcaatttaccaaagcttcgggtgatattgggggttacaatcccagcagactctaatgaaaagcatctgcaagtgattggctatgagaagatgattcatcatccacacttctcagtcacttctattgatcatgacatcatgctaatcaagctgaaaacagaggctgaactcaatgactatgtgaaattagccaacctgccctaccaaactatctctgaaaataccatgtgctctgtctctacctggagctacaatgtgtgtgatatctacaaagagcccgattcactgcaaactgtgaacatctctgtaatctccaagcctcagtgtcgcgatgcctataaaacctacaacatcacggaaaatatgctgtgtgtgggcattgtgccaggaaggaggcagccctgcaaggaagtttctgctgccccggcaatctgcaatgggatgcttcaaggaatcctgtcttttgcggatggatgtgttttgagagccgatgttggcatctatgccaaaattttttactatataccctggattgaaaatgtaatccaaaataactgagctgtggcagttgtggaccatatgacacagcttgtccccatcgttcacctttagaattaaatataaattaactcctcaaaaaaaaaaaaaaaaaaaaaaaaaaaa

SEQ ID NO: 125 - protein, 241 aa, Homo sapiens
MKFILLWALLNLTVALAFNPDYTVSSTPPYLVYLKSDYLPCAGVLIHPLWVITAAHCNLPKLRVILGVTIPADSNEKHLQVIGYEKMIHHPHFSVTSIDHDIMLIKLKTEAELNDYVKLANLPYQTISENTMCSVSTWSYNVCDIYKEPDSLQTVNISVISKPQCRDAYKTYNITENMLCVGIVPGRRQPCKEVSAAPAICNGMLQGILSFADGCVLRADVGIYAKIFYYIPWIENVIQNN

SEQ ID NO: 126 - DNA, 2393 bp, Homo sapiens
cgcccgggcaggttgagaagccaggggccaagatggatcttctcctcgacatcagctaagcctggaggactcttcccctcagagaccatggagagggacagccacgggaatgcatctccagcaagaacaccttcagctggagcatctccagcccaggcatctccagctgggacacctccaggccgggcatctccagcccaggcatctccagcccaggcatctccagctgggacacctccgggccgggcatctccagcccaggcatctccagctggtacacctccaggccgggcatctccaggccgggcatctccagcccaggcatctccagcccgggcatctccggctctggcatcactttccaggtcctcatccggcaggtcatcatccgccaggtcagcctcggtgacaacctccccaaccagagtgtaccttgttagagcaacaccagtgggggctgtacccatccgatcatctcctgccaggtcagcaccagcaaccagggccaccagggagagcccaggtacgagcctgcccaagttcacctggcgggagggccagaagcagctaccgctcatcgggtgcgtgctcctcctcattgccctggtggtttcgctcatcatcctcttccagttctggcagggccacacagggatcaggcacaaggagcagagggagagctgtcccaagcacgctgttcgctgtgacggggtggtggactgcaagctgaagagtgacgagctgggctgcgtgaggtttgactgggacaagtctctgcttaaaatctactctgggtcctcccatcagtggcttcccatctgtagcagcaactggaatgactcctactcagagaagacctgccagcagctgggtttcgagagtgctcaccggacaaccgaggttgcccacagggattttgccaacagcttctcaatcttgagatacaactccaccatccaggaaagcctccacaggtctgaatgcccttcccagcggtatatctccctccagtgttcccactgcggactgagggccatgaccgggcggatcgtgggaggggcgctggcctcggatagcaagtggccttggcaagtgagtctgcacttcggcaccacccacatctgtggaggcacgctcattgacgcccagtgggtgctcactgccgcccactgcttcttcgtgacccgggagaaggtcctggagggctggaaggtgtacgcgggcaccagcaacctgcaccagttgcctgaggcagcctccattgccgagatcatcatcaacagcaattacaccgatgaggaggacgactatgacatcgccctcatgcggctgtccaagcccctgaccctgtccgctcacatccaccctgcttgcctccccatgcatggacagacctttagcctcaatgagacctgctggatcacaggctttggcaagaccagggagacagatgacaagacatcccccttcctccgggaggtgcaggtcaatctcatcgacttcaagaaatgcaatgactacttggtctatgacagttaccttaccccaaggatgatgtgtgctggggaccttcgtgggggcagagactcctgccagggagacagcggggggcctcttgtctgtgagcagaacaaccgctggtacctggcaggtgtcaccagctggggcacaggctgtggccagagaaacaaacctggtgtgtacaccaaagtgacagaagttcttccctggatttacagcaagatggaggtaagatccctgcagcaggacactgcacccagcaggctgggaacttcctcaggtggggaccctggaggagcacccagggtgtaggcagaggtcccctcagcgtccccatattcggggggtgttctggacagggtcaaatgtgatgcctggggtcaatcccagctgtctgtgtttctttccctgcttttcttccctcagaacagagctcagcgggttgaaaaagggtggacctacaggccaggcaggcagttgctgggcagatgttctcccagaagtatttttttgtgtaaggttgcaatggactttgaaaacgtttcagtttctgcagaggattttgtgatagtctttgttatcaagcatttatgcatgggaatccgctcttcatggcctttcccagctctgtttgttttagtctttttgattttctttttgttgttgttgttgtctttttttaaaaacacaagtgactccattttaactctgacaactttcacagctgtcaccagaatgctccctgagaactaccattctttccctttcccacttaaaatatttcatcagaacctcaccactatcataaaagagtataaagtaataaaataataaaaagcgaaaaaaaaaaaaaaaaaaaaaaaaaaaaaaaa

SEQ ID NO: 127 - protein, 581 aa, Homo Sapiens
MERDSHGNASPARTPSAGASPAQASPAGTPPGRASPAQASPAQASPAGTPPGRASPAQASPAGTPPGRASPGRASPAQASPARASPALASLSRSSSGRSSSARSASVTTSPTRVYLVRATPVGAVPIRSSPARSAPATRATRESPGTSLPKFTWREGQKQLPLIGCVLLLIALVVSLIILFQFWQGHTGIRHKEQRESCPKHAVRCDGVVDCKLKSDELGCVRFDWDKSLLKIYSGSSHQWLPICSSNWNDSYSEKTCRQLGFESAHRTTEVAHRDFANSFSILRYNSTIQESLHRSHCPSQRYISLQCSHCGLRAMTGRIVGGALASDSKWPWQVSLHFGTTHICGGTLIDAQWVLTAAHCFFVTREKVLEGWKVYAGTSNLHQLPEAASIAEIIINSNYTDEEDDYDIALMRLSKPLTLSAHIHPACLPMHGQTFSLNETCWITGFGKTRETDDKTSPFLREVQVNLIDFKKCNDYLVYDSYLTPRMMCAGDLHGGRDSCQGDSGGPLVCEQNNRWYLAGVTSWGTGCGQRNKPGVYTKVTEVLPWIYSKMEVRSLQQDTAPSRLGTSSGGDPGGAPRV

SEQ ID NO: 128 - protein, 148 aa, Homo sapiens
CGKPKVVGKIYGGRDAAAGQWPWQASLLYWGSHLCGAVLIDSCWLVSTTHCFLNKSQAPKNYQVLLGNIQLYHQTQHTQKMSVHRIITHPDFEKLHPFGSDIAMLQLHLPMNFTSYIVPVCLPSRDMQLPSNVSCWITGWGMAILGGL

SEQ ID NO: 129 - DNA, 712 bp, Homo sapiens
cacagagggctccagcgtgattgccactggttaatgacctgccacccccgcccccccaacctctggtgccgtccaaggactctgaccccagtgcagtgtctgtagggaagaggagccatggggcttcgggcaggccccatcctgcttctgctgctgtggctgctgccagaatgcggccactccaaggaggccgggaggattgtgggaggccaagacacccaggaaggacgctggccgtggcaggttggcctgtggttgacctcagtggggcatgtatgtgggggcttcctcatccacccacgctgggtgctcacagccgcccactgcttcctgagggtgactccggggggccgctggtctgccccatcaatgatacgtggatccaggccggcattgtgagctggggattcggctgtgcccggcctttccggcctggtgtctacacccaggtgctaagctacacagactggattcagagaaccctggctgaatctcactcaggcatgtctggggcccgcccaggtgccccaggatcccactcaggcacctccagatcccacccagtgctgctgcttgagctgttgaccgtatgcttgcttgggtccctgtgaaccatgagccatggagtccgggatcccctttctggtaggattgatggaatctaataataaaaactgtaggttttttatgtgaaaaaaaaaaaaaaaaaaaa

SEQ ID NO: 130 - protein, 146 aa, Homo sapiens
MRPLQGGREDCGRPRHPGRTLAVAGWPVVDLSGACMWGLPHPPTLGAHSRPLLPEGDSGGPLVCPINDTWIQAGIVSWGFGCARPFRPGVYTQVLSYTDWIQRTLAESHSGMSGARPGAPGSHSGTSRSHPVLLLELLTVCLLGSL

SEQ ID NO: 131 - DNA, 800 bp, Homo sapiens
accaccatgaatccactcctgatccttacctttgtggcagctgctcttgctgccccctttgatgatgatgacaagatcgttgggggctacaactgtgaggagaattctgtcccctaccaggtgtccctgaattctggctaccacttctgtggtggctccctcatcaacgaacagtgggtggtatcagcaggccactgctacaagtcccgcatccaggtgagactgggagagcacaacatcgaagtcctggaggggaatgagcagttcatcaatgcagccaagatcatccgccacccccaatacgacaggaagactctgaacaatgacatcatgttaatcaagctctcctcacgtgcagtaatcaacgcccgcgtgtccaccatctctctgcccaccgcccctccagccactggcacgaagtgcctcatctctggctggggcaacactgcgagctctggcgccgactacccagacgagctgcagtgcctggacgctcctgtgctgagccaggctaagtgtgaagcctcctaccctggaaagattaccagcaacatgttctgtgtgggcttccttgagggaggcaaggattcatgtcagggtgattctggtggccctgtggtctgcaatggacagctccaaggagttgtctcctggggtgatggctgtgcccagaagaacaagcctggagtctacaccaaggtctacaactatgtgaaatggattaagaacaccatagctgccaatagctaaagcccccagtatctcttcagtctctataccaataaagtgaccctgttctc

SEQ ID NO: 132 - protein, 247 aa, Homo sapiens
MNPLLILTFVAAALAAPFDDDDKIVGGYNCEENSVPYQVSLNSGYHFCGGSLINEQWVVSAGHCYKSRIQVRLGEHNIEVLEGNEQFINAAKIIRHPQYDRKTLNNDIMLIKLSSRAVINARVSTISLPTAPPATGTKCLISGWGNTASSGADYPDELQCLDAPVLSQAKCEASYPGKITSNMFCVGFLEGGKDSCQGDSGGPVVCNGQLQGVVSWGDGCAQKNKPGVYTKVYNYVKWIKNTIAANS

SEQ ID NO: 133 - DNA, 938 bp, Homo sapiens
gcacggaggggcagagaccccggagccccagccccaccatgaccctcggccgccgactcgcgtgtcttttcctcgcctgtgtcctgccggccttgctgctggggggcaccgcgctggcctcggagattgtggggggccggcgagcgcggccccacgcgtggcccttcatggtgtccctgcagctgcgcggaggccacttctgcggcgccaccctgattgcgcccaacttcgtcatgtcggccgcgcactgcgtggcgaatgtaaacgtccgcgcggtgcgggtggtcctgggagcccataacctctcgcggcgggagcccacccggcaggtgttcgccgtgcagcgcatcttcgaaaacggctacgaccccgtaaacttgctcaacgacatcgtgattctccagctcaacgggtcggccaccatcaacgccaacgtgcaggtggcccagctgccggctcagggacgccgcctgggcaacggggtgcagtgcctggccatgggctggggccttctgggcaggaaccgtgggatcgccagcgtcctgcaggagctcaacgtgacggtggtgacgtccctctgccgtcgcagcaacgtctgcactctcgtgaggggccggcaggccggcgtctgtttcggggactccggcagccccttggtctgcaacgggctaatccacggaattgcctccttcgtccggggaggctgcgcctcagggctctaccccgatgcctttgccccggtggcacagtttgtaaactggatcgactctatcatccaacgctccgaggacaacccctgtccccacccccgggacccggacccggccagcaggacccactgagaagggctgcccgggtcacctcagctgcccacacccacactctccagcatctggcacaataaacattctctgttttgtagaaaaaaaaaaaaaaaa

SEQ ID NO: 134 - protein, 267 aa, Homo sapiens
MTLGRRLACLFLACVLPALLLGGTALASEIVGGRRARPHAWPFMVSLQLRGGHFCGATLIAPNFVMSAAHCVANVNVRAVRVVLGAHNLSRREPTRQVFAVQRIFENGYDPVNLLNDIVILQLNGSATINANVQVAQLPAQGRRLGNGVQCLAMGWGLLGRNRGIASVLQELNVTVVTSLCRRSNVCTLVRGRQAGVCFGDSGSPLVCNGLIHGIASFVRGGCASGLYPDAFAPVAQFVNWIDSIIQRSEDNPCPHPRDPDPASRTH

SEQ ID NO: 135 - DNA, 3895 bp, Homo sapiens
attccggcacagggacacaaacaagctcacccaacaaagccaagctgggaggaccaaggccgggcagccgggagcacccaaggcaggaaaatgaggtggctgcttctctattatgctctgtgcttctccctgtcaaaggcttcagcccacaccgtggagctaaacaatatgtttggccagatccagtcgcctggttatccagactcctatcccagtgattcagaggtgacttggaatatcactgtcccagatgggtttcggatcaagctttacttcatgcacttcaacttggaatcctcctacctttgtgaatatgactatgtgaaggtagaaactgaggaccaggtgctggcaaccttctgtggcagggagaccacagacacagagcagactcccggccaggaggtggtcctctcccctggctccttcatgtccatcactttccggtcagatttctccaatgaggagcgtttcacaggctttgatgcccactacatggctgtggatgtggacgagtgcaaggagagggaggacgaggagctgtcctgtgaccactactgccacaactacattggcggctactactgctcctgccgcttcggctacatcctccacacagacaacaggacctgccgagtggagtgcagtgacaacctcttcactcaaaggactggggtgatcaccagccctgacttcccaaacccttaccccaagagctctgaatgcctgtataccatcgagctggaggagggtttcatggtcaacctgcagtttgaggacatatttgacattgaggaccatcctgaggtgccctgcccctatgactacatcaagatcaaagttggtccaaaagttttggggcctttctgtggagagaaagccccagaacccatcagcacccagagccacagtgtcctgatcctgttccatagtgacaactcgggagagaaccggggctggaggctctcatacagggctgcaggaaatgagtgcccagagctacagcctcctgtccatgggaaaatcgagccctcccaagccaagtatttcttcaaagaccaagtgctcgtcagctgtgacacaggctacaaagtgctgaaggataatgtggagatggacacattccagattgagtgtctgaaggatgggacgtggagtaacaagattcccacctgtaaaattgtagactgtagagccccaggagagctggaacacgggctgatcaccttctctacaaggaacaacctcaccacatacaagtctgagatcaaatactcctgtcaggagccctattacaagatgctcaacaataacacaggtatatatacctgttctgcccaaggagtctggatgaataaagtattggggagaagcctacccacctgccttccagagtgtggtcagccctcccgctccctgccaagcctggtcaagaggatcattgggggccgaaatgctgagcctggcctcttcccgtggcaggccctgatagtggtggaggacacttcgagagtgccaaatgacaagtggtttgggagtggggccctgctctctgcgtcctggatcctcacagcagctcatgtgctgcgctcccagcgtagagacaccacggtgataccagtctccaaggagcatgtcaccgtctacctgggcttgcatgatgtgcgagacaaatcgggggcagtcaacagctcagctgcccgagtggtgctccacccagacttcaacatccaaaactacaaccacgatatagctctggtgcagctgcaggagcctgtgcccctgggaccccacgttatgcctgtctgcctgccaaggcttgagcctgaaggcccggccccccacatgctgggcctggtggccggctggggcatctccaatcccaatgtgacagtggatgagatcatcagcagtggcacacggaccttgtcagatgtcctgcagtatgtcaagttacccgtggtgcctcacgctgagtgcaaaactagctatgagtcccgctcgggcaattacagcgtcacggagaacatgttctgtgctggctactacgagggcggcaaagacacgtgccttggagatagcggtggggcctttgtcatctttgatgacttgagccagcgctgggtggtgcaaggcctggtgtcctgggggggacctgaagaatgcggcagcaagcaggtctatggagtctacacaaaggtctccaattacgtggactgggtgtgggagcagatgggcttaccacaaagtgttgtggagccccaggtggaacggtgagctgacttacttcctcggggcctgcctcccctgagcgaagctacaccgcacttccgacagcacactccacattacttatcagaccatatggaatggaacacactgacctagcggtggcttctcctaccgagacagcccccaggaccctgagaggcagagtgtggtatagggaaaaggctccaggcaggagacctgtgttcctgagcttgtccaagtctctttccctgtctgggcctcactctaccgagtaatacaatgcaggagctcaaccaaggcctctgtgccaatcccagcactcctttccaggccatgcttcttaccccagtggcctttattcactcctgaccacttatcaaacccatcggtcctactgttggtataactgagcttggacctgactattagaaaatggtttctaacattgaactgaatgccgcatctgtatattttcctgctctgccttctgggactagccttggcctaatccttcctctaggagaagagcattcaggttttgggagatggctcatagccaagcccctctctcttagtgtgatcccttggagcaccttcatgcctggggtttctctcccaaaagcttcttgcagtctaagccttatcccttatgttccccattaaaggaatttcaaaagacatggagaaagttgggaaggtttgtgctgactgctgggagcagaatagccgtgggaggcccaccaagcccttaaattcccattgtcaactcagaacacatttgggcccatatgccaccctggaacaccagctgacaccatgggcgtccacacctgctgctccagacaagcacaaagcaatctttcagccttgaaatgtattatctgaaaggctacctgaagcccaggcccgaatatggggacttagtcgattacctggaaaaagaaaagacccacactgtgtcctgctgtgcttttgggcaggaaaatggaagaaagagtggggtgggcacattagaagtcacccaaatcctgccaggctgcctggcatccctggggcatgagctgggcggagaatccaccccgcaggatgttcagagggacccactccttcatttttcagagtcaaaggaatcagaggctcacccatggcaggcagtgaaaagagccaggagtcctgggttctagtccctgctctgcccccaactggctgtataacctttgaaaaatcattttctttgtctgagtctctggttctccgtcagcaacaggctggcataaggtcccctgcaggttccttctagctggagcactcagagcttccctgactgctagcagcctctctggccctcacagggctgattgttctccttctccctggagctctctctcctgaaaatctccatcagagcaaggcagccagagaagcccctgagagggaatgattgggaagtgtccactttctcaaccggctcatcaaacacactcctttgtctatgaatggcacatgtaaatgatgttatattttgtatcttttatatcatatgcttcaccattctgtaaagggcctctgcattgttgctcccatcaggggtctcaagtggaaataaaccctcgtggataaccaaaaaaaaaaaaaaaaaaaa

SEQ ID NO: 136 - protein, 728 aa, Homo sapiens
MRWLLLYYALCFSLSKASAHTVELNNMFGQIQSPGYPDSYPSDSEVTWNITVPDGFRIKLYFMHFNLESSYLCEYDYVKVETEDQVLATFCGRETTDTEQTPGQEVVLSPGSFMSITFRSDFSNEERFTGFDAHYMAVDVDECKEREDEELSCDHYCHNYIGGYYCSCRFGYILHTDNRTCRVECSDNLFTQRTGVITSPDFPNPYPKSSECLYTIELEEGFMVNLQFEDIFDIEDHPEVPCPYDYIKIKVGPKVLGPFCGEKAPEPISTQSHSVLILFHSDNSGENRGWRLSYRAAGNECPELQPPVHGKIEPSQAKYFFKDQVLVSCDTGYKVLKDNVEMDTFQIECLKDGTWSNKIPTCKIVDCRAPGELEHGLITFSTRNNLTTYKSEIKYSCQEPYYKMLNNNTGIYTCSAQGVWMNKVLGRSLPTCLPECGQPSRSLPSLVKRIIGGRNAEPGLFPWQALIVVEDTSRVPNDKWFGSGALLSASWILTAAHVLRSQRRDTTVIPVSKEHVTVYLGLHDVRDKSGAVNSSAARVVLHPDFNIQNYNHDIALVQLQEPVPLGPHVMPVCLPRLEPEGPAPHMLGLVAGWGISNPNVTVDEIISSGTRTLSDVLQYVKLPVVPHAECKTSYESRSGNYSVTENMFCAGYYEGGKDTCLGDSGGAFVIFDDLSQRWVVQGLVSWGGPEECGSKQVYGVYTKVSNYVDWVWEQMGLPQSVVEPQVER

SEQ ID NO: 137 - DNA, 924 bp, Homo sapiens
gcacagcagcaactgactgggcagcctttcaggaaagatgcagccactcctgcttctgctggcctttctcctacccactggggctgaggcaggggagatcatcggaggccgggagagcaggccccactcccgcccctacatggcgtatcttcagatccagagtccagcaggtcagagcagatgtggagggttcctggtgcgagaagactttgtgctgacagcagctcattgctggggaagcaatataaatgtcaccctgggcgcccacaatatccagagacgggaaaacacccagcaacacatcactgcgcgcagagccatccgccaccctcaatataatcagcggaccatccagaatgacatcatgttattgcagctgagcagaagagtcagacggaatcgaaacgtgaacccagtggctctgcctagagcccaggagggactgagacccgggacgctgtgcactgtggccggctggggcagggtcagcatgaggaggggaacagatacactccgagaggtgcagctgagagtgcagagggataggcagtgcctccgcatcttcggttcctacgacccccgaaggcagatttgtgtgggggaccggcgggaacggaaggctgccttcaagggggattccggaggccccctgctgtgtaacaatgtggcccacggcatcgtctcctatggaaagtcgtcaggggttcctccagaagtcttcaccagggtctcaagtttcctgccctggataaggacaacaatgagaagcttcaaactgctggatcagatggagacccccctgtgactgactcttcttctcggggacacaggccagctccacagtgttgccagagccttaataaacgtccacagagtataaataaccaattcctcatttgttcattaaacgtcattcagtactta

SEQ ID NO: 138 - protein, 255 aa, Homo sapiens
MQPLLLLLAFLLPTGAEAGEIIGGRESRPHSRPYMAYLQIQSPAGQSRCGGFLVREDFVLTAAHCWGSNINVTLGAHNIQRRENTQQHITARRAIRHPQYNQRTIQNDIMLLQLSRRVRRNRNVNPVALPRAQEGLRPGTLCTVAGWGRVSMRRGTDTLREVQLRVQRDRQCLRIFGSYDPRRQICVGDRRERKAAFKGDSGGPLLCNNVAHGIVSYGKSSGVPPEVFTRVSSFLPWIRTTMRSFKLLDQMETPL

SEQ ID NO: 139 - DNA, 1001 bp, Homo sapiens
cgtgggtgcaccctggaccccaccatggctcaccggccccccagccctgccctggcgtccgtgctgctggccttgctgctgagcggtgctgcccgagctgcggagatcgtgggcgggcacgaggcgcagccacactcccggccctacatggcctccctgcagatgcgggggaacccgggcagccacttctgcggaggcaccttgatccaccccagcttcgtgctgacggccgcgcactgcctgcgggacataccccagcgcctggtgaacgtggtgctcggagcccacaacgtgcggacgcaggagcccacccagcagcacttctcggtggctcaggtgtttctgaacaactacgacgcggagaacaaactgaacgacgttctcctcatccagctgagcagcccagccaacctcagtgcctccgtcgccacagtccagctgccacagcaggaccagccagtgccccacggcacccagtgcctggccatgggctggggccgcgtgggtgcccacgaccccccagcccaggtcctgcaggagctcaatgtcaccgtggtcaccttcttctgccggccacataacatttgcactttcgtccctcgccgcaaggccggcatctgcttcggagactcaggtggccccctgatctgtgatggcatcatccaaggaatagactccttcgtgatctggggatgtgccacccgccttttccctgacttcttcacgcgggtagccctctacgtggactggatccgttccacgctgcgccgtgtggaggccaagggccgcccctgaaccgcccctcccacagcgctggccgggaccccgagcctggctccaaaccctcgaggcggatctttggacagaagcagctcttccccgaacactgtggcgtccgggacggccccacccgtccccccacactccctcccacggggctccgggagacaggccggccctgcacctcaccccaccgtgacctcaataaacgttgaaactcc

SEQ ID NO: 140 - protein, 256 aa, Homo sapiens
MAHRPPSPALASVLLALLLSGAARAAEIVGGHEAQPHSRPYMASLQMRGNPGSHFCGGTLIHPSFVLTAAHCLRDIPQRLVNVVLGAHNVRTQEPTQQHFSVAQVFLNNYDAENKLNDVLLIQLSSPANLSASVATVQLPQQDQPVPHGTQCLAMGWGRVGAHDPPAQVLQELNVTVVTFFCRPHNICTFVPRRKAGICFGDSGGPLICDGIIQGIDSFVIWGCATRLFPDFFTRVALYVDWIRSTLRRVEAKGRP

SEQ ID NO: 141 - DNA, 878 bp, Homo sapiens
cagattttcaggttgattgatgtgggacagcagccacaatgaggaactcctatagatttctggcatcctctctctcagttgtcgtttctctcctgctaattcctgaagatgtctgtgaaaaaattattggaggaaatgaagtaactcctcattcaagaccctacatggtcctacttagtcttgacagaaaaaccatctgtgctggggctttgattgcaaaagactgggtgttgactgcagctcactgtaacttgaacaaaaggtcccaggtcattcttggggctcactcaataaccagggaagagccaacaaaacagataatgcttgttaagaaagagtttccctatccatgctatgacccagccacacgcgaaggtgaccttaaacttttacagctgacggaaaaagcaaaaattaacaaatatgtgactatccttcatctacctaaaaagggggatgatgtgaaaccaggaaccatgtgccaagttgcagggtgggggaggactcacaatagtgcatcttggtccgatactctgagagaagtcaatatcaccatcatagacagaaaagtctgcaatgatcgaaatcactataattttaaccctgtgattggaatgaatatggtttgtgctggaagcctccgaggtggaagagactcgtgcaatggagattctggaagccctttgttgtgcgagggtgttttccgaggggtcacttcctttggccttgaaaataaatgcggagaccctcgtgggcctggtgtctatattcttctctcaaagaaacacctcaactggataattatgactatcaagggagcagtttaaataaccgtttcctttcatttactgtggcttcttaatcttttcacaaataaa

SEQ ID NO: 142 - protein, 262 aa, Homo sapiens
MRNSYRFLASSLSVVVSLLLIPEDVCEKIIGGNEVTPHSRPYMVLLSLDRKTICAGALIAKDWVLTAAHCNLNKRSQVILGAHSITREEPTKQIMLVKKEFPYPCYDPATREGDLKLLQLTEKAKINKYVTILHLPKKGDDVKPGTMCQVAGWGRTHNSASWSDTLREVNITIIDRKVCNDRNHYNFNPVIGMNMVCAGSLRGGRDSCNGDSGSPLLCEGVFRGVTSFGLENKCGDPRGPGVYILLSKKHLNWIIMTIKGAV

SEQ ID NO: 143 - DNA, 947 bp, Homo sapiens
ggctcggggccggggccagcacccacactgggtctccacagcggcatggaggcctgcgtgtcttcactgctggtgctggccctgggggccctgtcagtaggcagctcctttgggacccagatcatcgggggccgggaggtgatcccccactcgcgcccgtacatggcctcactgcagagaaatggctcccacctgtgcgggggtgtcctggtgcacccaaagtgggtgctgacggctgcccactgcctggcccagcggatggcccagctgaggctggtgctggggctccacaccctggacagccccggtctcaccttccacatcaaggcagccatccagcaccctcgctacaagcccgtccctgccctggagaacgacctcgcgctgcttcagctggacgggaaagtgaagcccagccggaccatccggccgttggccctgcccagtaagcgccaggtggtggcagcagggactcggtgcagcatggccggctgggggctgacccaccagggcgggcgcctgtcccgggtgctgcgggagctggacctccaagtgctggacacccgcatgtgtaacaacagccgcttctggaacggcagcctctcccccagcatggtctgcctggcggccgactccaaggaccaggctccctgcaagggtgactcgggcgggcccctggtgtgtggcaaaggccgggtgttggccggagtcctgtccttcagctccagggtctgcactgacatcttcaagcctcccgtggccaccgctgtggcgccttacgtgtcctggatcaggaaggtcaccggccgatcggcctgatgccctggggtgatggggaccccctcgctgtctccacaggacccttcccctccaggggtgcagtggggtgggtgaggacgggtgggagggacagggagggaccaataaatcataatgaagaaacgctc

SEQ ID NO: 144 - protein, 257 aa, Homo sapiens
MEACVSSLLVLALGALSVGSSFGTQIIGGREVIPHSRPYMASLQRNGSHLCGGVLVHPKWVLTAAHCLAQRMAQLRLVLGLHTLDSPGLTFHIKAAIQHPRYKPVPALENDLALLQLDGKVKPSRTIRPLALPSKRQVVAAGTRCSMAGWGLTHQGGRLSRVLRELDLQVLDTRMCNNSRFWNGSLSPSMVCLAADSKDQAPCKGDSGGPLVCGKGRVLAGVLSFSSRVCTDIFKPPVATAVAPYVSWIRKVTGRSA

SEQ ID NO: 145 - DNA, 784 bp, Homo sapiens
agcatttgctcaggcagcctctctgggaagatgctgcttcttcctctccccctgctgctctttctcttgtgctccagagctgaagctggggagatcatcgggggcacagaatgcaagccacattcccgcccctacatggcctacctggaaattgtaacttccaacggtccctcaaaattttgtggtggtttccttataagacggaactttgtgctgacggctgctcattgtgcaggaaggtctataacagtcacccttggagcccataacataacagaggaagaagacacatggcagaagcttgaggttataaagcaattccgtcatccaaaatataacacttctactcttcaccacgatatcatgttactaaagttgaaggagaaagccagcctgaccctggctgtggggacactccccttcccatcacaattcaactttgtcccacctgggagaatgtgccgggtggctggctggggaagaacaggtgtgttgaagccgggctcagacactctgcaagaggtgaagctgagactcatggatccccaggcctgcagccacttcagagactttgaccacaatcttcagctgtgtgtgggcaatcccaggaagacaaaatctgcatttaagggagactctgggggccctcttctgtgtgctggggtggcccagggcatcgtatcctatggacggtcggatgcaaagccccctgctgtcttcacccgaatctcccattaccggccctggatcaaccagatcctgcaggcaaattaatcctggatcc

SEQ ID NO: 146 - protein, 247 aa, Homo sapiens
MLLLPLPLLLFLLCSRAEAGEIIGGTECKPHSRPYMAYLEIVTSNGPSKFCGGFLIRRNFVLTAAHCAGRSITVTLGAHNITEEEDTWQKLEVIKQFRHPKYNTSTLHHDIMLLKLKEKASLTLAVGTLPFPSQFNFVPPGRMCRVAGWGRTGVLKPGSDTLQEVKLRLMDPQACSHFRDFDHNLQLCVGNPRKTKSAFKGDSGGPLLCAGVAQGIVSYGRSDAKPPAVFTRISHYRPWINQILQAN

SEQ ID NO: 147 - DNA, 1194 bp, Homo sapiens; identical to SEQ ID NO: 76

SEQ ID NO: 148 - protein, 275 aa, Homo sapiens; identical to SEQ ID NO: 77

SEQ ID NO: 149 - DNA, 1074 bp, Homo sapiens
gatcaacacatttcatctgggcttcttaaatctaaatctttaaaatgactaagttttcttccttttctctgtttttcctaatagttggggcttatatgactcatgtgtgtttcaatatggaaattattggagggaaagaagtgtcacctcattccaggccatttatggcctccatccagtatggcggacatcacgtttgtggaggtgttctgattgatccacagtgggtgctgacagcagcccactgccaatatcggtttaccaaaggccagtctcccactgtggttttaggcgcacactctctctcaaagaatgaggcctccaaacaaacactggagatcaaaaaatttataccattctcaagagttacatcagatcctcaatcaaatgatatcatgctggttaagcttcaaacagccgcaaaactcaataaacatgtcaagatgctccacataagatccaaaacctctcttagatctggaaccaaatgcaaggttactggctggggagccaccgatccagattcattaagaccttctgacaccctgcgagaagtcactgttactgtcctaagtcgaaaactttgcaacagccaaagttactacaacggcgacccttttatcaccaaagacatggtctgtgcaggagatgccaaaggccagaaggattcctgtaagggtgactcagggggccccttgatctgtaaaggtgtcttccacgctatagtctctggaggtcatgaatgtggtgttgccacaaagcctggaatctacaccctgttaaccaagaaataccagacttggatcaaaagcaaccttgtcccgcctcatacaaattaagttacaaataattttattggatgcacttgcttcttttttcctaatatgctcgcaggttagagttgggtgtaagtaaagcagagcacatatggggtccatttttgcacttgtaagtcattttattaaggaatcaagttctttttcacttgtatcactgatgtatttctaccatgctggttttattctaaataaaatttagaagactcaaaaaaaaaaaaaaaaaaaaaaaaaaaaa

SEQ ID NO: 150 - protein, 264 aa, Homo sapiens
MTKFSSFSLFFLIVGAYMTHVCFNMEIIGGKEVSPHSRPFMASIQYGGHHVCGGVLIDPQWVLTAAHCQYRFTKGQSPTVVLGAHSLSKNEASKQTLEIKKFIPFSRVTSDPQSNDIMLVKLQTAAKLNKHVKMLHIRSKTSLRSGTKCKVTGWGATDPDSLRPSDTLREVTVTVLSRKLCNSQSYYNGDPFITKDMVCAGDAKGQKDSCKGDSGGPLICKGVFHAIVSGGHECGVATKPGIYTLLTKKYQTWIKSNLVPPHTN

SEQ ID NO: 151 - DNA, 1047 bp, Homo sapiens
ggagtcaacaccaacagctctgacctgggcagccttcctgagaaaatgcagccattcctcctcctgttggcctttcttctgacccctggggctgggacagaggagatcatcgggggccatgaggccaagccccactcccgcccctacatggcctttgttcagtttctgcaagagaagagtcggaagaggtgtggcggcatcctagtgagaaaggactttgtgctgacagctgctcactgccagggaagctccataaatgtcaccttgggggcccacaatatcaaggaacaggagcggacccagcagtttatccctgtgaaaagacccatcccccatccagcctataatcctaagaacttctccaacgacatcatgctactgcagctggagagaaaggccaagtggaccacagctgtgcggcctctcaggctacctagcagcaaggcccaggtgaagccagggcagctgtgcagtgtggctggctggggttatgtctcaatgagcactttagcaaccacactgcaggaagtgttgctgacagtgcagaaggactgccagtgtgaacgtctcttccatggcaattacagcagagccactgagatttgtgtgggggatccaaagaagacacagaccggtttcaagggggactccggggggcccctcgtgtgtaaggacgtagcccaaggtattctctcctatggaaacaaaaaagggacacctccaggagtctacatcaaggtctcacacttcctgccctggataaagagaacaatgaagcgcctctaacagcaggcatgagactaaccttcctctgggcctgaccatctctgggacagaggcaagaatccccaaggggtgggcagtcagggttgcaggactgtaataaatggatctctggtgtagaaaaaaaaaaaaaaaaaaaaaaaaaaaaaaaaaaaaaaaaaaaaaaaaaaaaaaaaaaaaaaaaaaaaaaaaaaaaaaaaaaaaaaaaaaaaaaaaaaaaaaaaaaaaaaaaaaaaaaaaaaaaaaaaaaaaaaaaaaaaaaaa

SEQ ID NO: 152 - protein, 246 aa, Homo sapiens
MQPFLLLLAFLLTPGAGTEEIIGGHEAKPHSRPYMAFVQFLQEKSRKRCGGILVRKDFVLTAAHCQGSSINVTLGAHNIKEQERTQQFIPVKRPIPHPAYNPKNFSNDIMLLQLERKAKWTTAVRPLRLPSSKAQVKPGQLCSVAGWGYVSMSTLATTLQEVLLTVQKDCQCERLFHGNYSRATEICVGDPKKTQTGFKGDSGGPLVCKDVAQGILSYGNKKGTPPGVYIKVSHFLPWIKRTMKRL

SEQ ID NO: 153 - DNA, 952 bp, Homo sapiens
ttggtccaagcaagaaggcagtggtctactccatcggcaacatgctggtcctttatggacacagcacccaggaccttccggaaaccaatgcccgcgtagtcggagggactgaggccgggaggaattcctggccctctcagatttccctccagtaccggtctggaggttcccggtatcacacctgtggagggacccttatcagacagaactgggtgatgacagctgctcactgcgtggattaccagaagactttccgcgtggtggctggagaccataacctgagccagaatgatggcactgagcagtacgtgagtgtgcagaagatcgtggtgcatccatactggaacagcgataacgtggctgccggctatgacatcgccctgctgcgcctggcccagagcgttaccctcaatagctatgtccagctgggtgttctgccccaggagggagccatcctggctaacaacagtccctgctacatcacaggctggggcaagaccaagaccaatgggcagctggcccagaccctgcagcaggcttacctgccctctgtggactacgccatctgctccagctcctcctactggggctccactgtgaagaacaccatggtgtgtgctggtggagatggagttcgctctggatgccagggtgactctgggggccccctccattgcttggtgaatggcaagtattctgtccatggagtgaccagctttgtgtccagccggggctgtaatgtctccaggaagcctacagtcttcacccaggtctctgcttacatctcctggataaataatgtcatcgcctccaactgaacattttcctgagtccaacgaccttcccaaaatggttcttagatctgcaataggacttgcgatcaaaaagtaaaacacattctgaaagactattgagccattgatagaaaagcaaataaaactagatatacatt

SEQ ID NO: 154 - protein, 258 aa, Homo sapiens
MLVLYGHSTQDLPETNARVVGGTEAGRNSWPSQISLQYRSGGSRYHTCGGTLIRQNWVMTAAHCVDYQKTFRVVAGDHNLSQNDGTEQYVSVQKIVVHPYWNSDNVAAGYDIALLRLAQSVTLNSYVQLGVLPQEGAILANNSPCYITGWGKTKTNGQLAQTLQQAYLPSVDYAICSSSSYWGSTVKNTMVCAGGDGVRSGCQGDSGGPLHCLVNGKYSVHGVTSFVSSRGCNVSRKPTVFTQVSAYISWINNVIASN

SEQ ID NO: 155 - DNA, 963 bp, Homo sapiens
tcctatcatcacaaaactcatgatgctccggctgctcagttccctcctccttgtggccgttgcctcaggctatggcccaccttcctctcactcttccagccgcgttgtccatggtgaggatgcggtcccctacagctggccctggcaggtttccctgcagtatgagaaaagtggaagcttctaccacacgtgtggcggtagcctcatcgcccccgattgggttgtgactgccggccactgcatctcgagggatctgacctaccaggtggtgttgggtgagtacaaccttgctgtgaaggagggccccgagcaggtgatccccatcaactctgaggagctgtttgtgcatccactctggaaccgctcgtgtgtggcctgtggcaatgacatcgccctcatcaagctctcacgcagcgcccagctgggagatgccgtccagctcgcctcactccctcccgctggtgacatccttcccaacaagacaccctgctacatcaccggctggggccgtctctataccaatgggccactcccagacaagctgcagcaggcccggctgcccgtggtggactataagcactgctccaggtggaactggtggggttccaccgtgaagaaaaccatggtgtgtgctggagggtacatccgctccggctgcaacggtgactctggaggacccctcaactgccccacagaggatggtggctggcaggtccacggtgtgaccagctttgtttctggctttggctgcaacttcatctggaagcccacggtgttcactcgagtctccgccttcatcgactggattgaggagaccatagcaagccactagaaccaaggcccagctggcagtgctgatcgatcccacatcctgaataaagaataaagatctctcagaaaattccaaaaaaaaaaaaaaaaaaaaaaaaaaaaaaaaaaaaaaaaaaaaaaaaaaaaaaaaaa

SEQ ID NO: 156 - protein, 270 aa, Homo sapiens
MMLRLLSSLLLVAVASGYGPPSSHSSSRVVHGEDAVPYSWPWQVSLQYEKSGSFYHTCGGSLIAPDWVVTAGHCISRDLTYQVVLGEYNLAVKEGPEQVIPINSEELFVHPLWNRSCVACGNDIALIKLSRSAQLGDAVQLASLPPAGDILPNKTPCYITGWGRLYTNGPLPDKLQQARLPVVDYKHCSRWNWWGSTVKKTMVCAGGYIRSGCNGDSGGPLNCPTEDGGWQVHGVTSFVSGFGCNFIWKPTVFTRVSAFIDWIEETIASH

SEQ ID NO: 157 - DNA, 914 bp, Homo sapiens
ttttacagaactcccacggacacaccatgataaggacgctgctgctgtccactttggtggctggagccctcagttgtggggaccccacttacccaccttatgtgactagggtggttggcggtgaagaagcgaggcccaacagctggccctggcaggtctccctgcagtacagctccaatggcaagtggtaccacacctgcggagggtccctgatagccaacagctgggtcctgacggctgcccactgcatcagctcctccaggacctaccgcgtggggctgggccggcacaacctctacgttgcggagtccggctcgctggcagtcagtgtctctaagattgtggtgcacaaggactggaactccaaccaaatctccaaagggaacgacattgccctgctcaaactggctaaccccgtctccctcaccgacaagatccagctggcctgcctccctcctgccggcaccattctacccaacaactacccctgctacgtcacgggctggggaaggctgcagaccaacggggctgttcctgatgtcctgcagcagggccggttgctggttgtggactatgccacctgctccagctctgcctggtggggcagcagcgtgaaaaccagtatgatctgtgctgggggtgatggcgtgatctccagctgcaacggagactctggcgggccactgaactgtcaggcgtctgacggccggtggcaggtgcacggcatcgtcagcttcgggtctcgcctcggctgcaactactaccacaagccctccgtcttcacgcgggtctccaattacatcgactggatcaattcggtgattgcaaataactaaccaaaagaagtccctgggactgtttcagacttggaaaggtcacagaaggaaaataatataataaagtgacaactatgc

SEQ ID NO: 158 - protein, 269 aa, Homo sapiens
MIRTLLLSTLVAGALSCGDPTYPPYVTRVVGGEEARPNSWPWQVSLQYSSNGKWYHTCGGSLIANSWVLTAAHCISSSRTYRVGLGRHNLYVAESGSLAVSVSKIVVHKDWNSNQISKGNDIALLKLANPVSLTDKIQLACLPPAGTILPNNYPCYVTGWGRLQTNGAVPDVLQQGRLLVVDYATCSSSAWWGSSVKTSMICAGGDGVISSCNGDSGGPLNCQASDGRWQVHGIVSFGSRLGCNYYHKPSVFTRVSNYIDWINSVIANN

SEQ ID NO: 159 - DNA, 3696 bp, Homo sapiens
accagacagttcttaaattagcaagccttcaaaaccaaaaatggggtcgaaaagaggcatatcttctaggcatcattctctcagctcctatgaaatcatgtttgcagctctctttgccatattggtagtgctctgtgctggattaattgcagtatcctgcctgacaatcaaggaatcccaacgaggtgcagcacttggacagagtcatgaagccagagcgacatttaaaataacatccggagttacatataatcctaatttgcaagacaaactctcagtggatttcaaagttcttgcttttgaccttcagcaaatgatagatgagatctttctatcaagcaatctgaagaatgaatataagaactcaagagttttacaatttgaaaatggcagcattatagtcgtatttgaccttttctttgcccagtgggtgtcagatcaaaatgtaaaagaagaactgattcaaggccttgaagcaaataaatccagccaactggtcactttccatattgatttgaacagcgttgatatcctagacaagctaacaaccaccagtcatctggcaactccaggaaatgtctcaatagagtgcctgcctggttcaagtccttgtactgatgctctaacgtgtataaaagctgatttattttgtgatggagaagtaaactgtccagatggttctgacgaagacaataaaatgtgtgccacagtttgtgatggaagatttttgttaactggatcatctgggtctttccaggctactcattatccaaaaccttctgaaacaagtgttgtctgccagtggatcatacgtgtaaaccaaggactttccattaaactgagcttcgatgattttaatacatattatacagatatattagatatttatgaaggtgtaggatcaagcaagattttaagagcttctatttgggaaactaatcctggcacaataagaattttttccaaccaagttactgccacctttcttatagaatctgatgaaagtgattatgttggctttaatgcaacatatactgcatttaacagcagtgagcttaataattatgagaaaattaattgtaactttgaggatggcttttgtttctgggtccaggatctaaatgatgataatgaatgggaaaggattcagggaagcaccttttctccttttactggacccaattttgaccacacttttggcaatgcttcaggattttacatttctaccccaactggaccaggagggagacaagaacgagtggggcttttaagcctccctttggaccccactttggagccagcttgccttagtttctggtatcatatgtatggtgaaaatgtccataaattaagcattaatatcagcaatgaccaaaatatggagaagacagttttccaaaaggaaggaaattatggagacaattggaattatggacaagtaaccctaaatgaaacagttaaatttaaggttgcttttaatgcttttaaaaacaagatcctgagtgatattgcgttggatgacattagcctaacatatgggatttgcaatgggagtctttatccagaaccaactttggtgccaactcctccaccagaacttcctacggactgtggaggaccttttgagctgtgggagccaaatacaacattcagttctacgaactttccaaacagctaccctaatctggctttctgtgtttggattttaaatgcacaaaaaggaaagaatatacaacttcattttcaagaatttgacttagaaaatattaacgatgtagttgaaataagagatggtgaagaagctgattccttgctcttagctgtgtacacagggcctggcccagtaaaggatgtgttctctaccaccaacagaatgactgtgcttctcatcactaacgatgtgttggcaagaggagggtttaaagcaaactttactactggctatcacttggggattccagagccatgcaaggcagaccattttcaatgtaaaaatggagagtgtgttccactggtgaatctctgtgacggtcatctgcactgtgaggatggctcagatgaagcagattgtgtgcgttttttcaatggcacaacgaacaacaatggtttagtgcggttcagaatccagagcatatggcatacagcttgtgctgagaactggaccacccagatttcaaatgatgtttgtcaactgctgggactagggagtggaaactcatcaaagccaatcttctctaccgatggtggaccatttgtcaaattaaacacagcacctgatggccacttaatactaacacccagtcaacagtgtttacaggattccttgattcggttacagtgtaaccataaatcttgtggaaaaaaactggcagctcaagacatcaccccaaagattgttggaggaagtaatgccaaagaaggggcctggccctgggttgtgggtctgtattatggcggccgactgctctgcggcgcatctctcgtcagcagtgactggctggtgtccgccgcacactgcgtgtatgggagaaacttagagccatccaagtggacagcaatcctaggcctgcatatgaaatcaaatctgacctctcctcaaacagtccctcgattaatagatgaaattgtcataaaccctcattacaataggcgaagaaaggacaacgacattgccatgatgcatctggaatttaaagtgaattacacagattacatacaacctatttgtttaccggaagaaaatcaagtttttcctccaggaagaaattgttctattgctggttgggggacggttgtatatcaaggtactactgcaaacatattgcaagaagctgatgttcctcttctatcaaatgagagatgccaacagcagatgccagaatataacattactgaaaatatgatatgtgcaggctatgaagaaggaggaatagattcttgtcagggggattcaggaggaccattaatgtgccaagaaaacaacaggtggttccttgctggtgtgacctcatttggatacaagtgtgccctgcctaatcgccccggagtgtatgccagggtctcaaggtttaccgaatggatacaaagttttctacattagcgcatttcttaaactaaacaggaaagtcgcattattttcccattctactctagaaagcatggaaattaagtgtttcgtacaaaaattttaaaaagttaccaaaggtttttattcttacctatgtcaatgaaatgctagggggccagggaaacaaaattttaaaaataataaaattcaccatagcaatacagaataactttaaaataccattaaatacatttgtatttcattgtgaacaggtatttcttcacagatctcatttttaaaattcttaatgattatttttattacttactgttgtttaaagggatgttattttaaagcatataccatacacttaagaaatttgagcagaatttaaaaaagaaagaaaataaattgtttttcccaaagtatgtcactgttggaaataaactgccataaattttctagttccagtttagtttgctgctattagcagaaactcaattgtttctctgtcttttctatcaaaattttcaacatatgcataaccttagtattttcccaaccaatagaaactatttattgtaagcttatgtcacaggcctggactaaattgattttacgttcctctt

SEQ ID NO: 160 - protein, 1019 aa, Homo sapiens
MGSKRGISSRHHSLSSYEIMFAALFAILVVLCAGLIAVSCLTIKESQRGAALGQSHEARATFKITSGVTYNPNLQDKLSVDFKVLAFDLQQMIDEIFLSSNLKNEYKNSRVLQFENGSIIVVFDLFFAQWVSDQNVKEELIQGLEANKSSQLVTFHIDLNSVDILDKLTTTSHLATPGNVSIECLPGSSPCTDALTCIKADLFCDGEVNCPDGSDEDNKMCATVCDGRFLLTGSSGSFQATHYPKPSETSVVCQWIIRVNQGLSIKLSFDDFNTYYTDILDIYEGVGSSKILRASIWETNPGTIRIFSNQVTATFLIESDESDYVGFNATYTAFNSSELNNYEKINCNFEDGFCFWVQDLNDDNEWERIQGSTFSPFTGPNFDHTFGNASGFYISTPTGPGGRQERVGLLSLPLDPTLEPACLSFWYHMYGENVHKLSINISNDQNMEKTVFQKEGNYGDNWNYGQVTLNETVKFKVAFNAFKNKILSDIALDDISLTYGICNGSLYPEPTLVPTPPPELPTDCGGPFELWEPNTTFSSTNFPNSYPNLAFCVWILNAQKGKNIQLHFQEFDLENINDVVEIRDGEEADSLLLAVYTGPGPVKDVFSTTNRMTVLLITNDVLARGGFKANFTTGYHLGIPEPCKADHFQCKNGECVPLVNLCDGHLHCEDGSDEADCVRFFNGTTNNNGLVRFRIQSIWHTACAENWTTQISNDVCQLLGLGSGNSSKPIFSTDGGPFVKLNTAPDGHLILTPSQQCLQDSLIRLQCNHKSCGKKLAAQDITPKIVGGSNAKEGAWPWVVGLYYGGRLLCGASLVSSDWLVSAAHCVYGRNLEPSKWTAILGLHMKSNLTSPQTVPRLIDEIVINPHYNRRRKDNDIAMMHLEFKVNYTDYIQPICLPEENQVFPPGRNCSIAGWGTVVYQGTTANILQEADVPLLSNERCQQQMPEYNITENMICAGYEEGGIDSCQGDSGGPLMCQENNRWFLAGVTSFGYKCALPNRPGVYARVSRFTEWIQSFLH

SEQ ID NO: 161 - DNA, 917 bp, Homo sapiens
cagccagtcctgagcacctaaccatgttgggcatcactgtcctcgctgcgctcttggcctgtgcctccagctgtggggtgcccagcttcccgcccaacctatccgcccgagtggtgggaggagaggatgcccggccccacagctggccctggcagatctccctccagtacctcaagaacgacacgtggaggcatacgtgtggcgggactttgattgctagcaacttcgtcctcactgccgcccactgcatcagcaacacccggacctaccgtgtggccgtgggaaagaacaacctggaggtggaagacgaagaaggatccctgtttgtgggtgtggacaccatccacgtccacaagagatggaatgccctcctgttgcgcaatgatattgccctcatcaagcttgcagagcatgtggagctgagtgacaccatccaggtggcctgcctgccagagaaggactccctgctccccaaggactacccctgctatgtcaccggctggggccgcctctggaccaacggccccattgctgataagctgcagcagggcctgcagcccgtggtggatcacgccacgtgctccaggattgactggtggggcttcagggtgaagaaaaccatggtgtgcgctgggggcgatggcgtcatctcagcctgcaatggggactccggtggcccactgaactgccagttggagaacggttcctgggaggtgtttggcatcgtcagctttggctcccggcggggctgcaacacccgcaagaagccggtagtctacacccgggtgtccgcctacatcgactggatcaacgagaaaatgcagctgtgatttgttgctgggagcggcggcagcgagtccctgcaacagcaataaacttccttctcctcgggccacctgaaaaaaaaaaaaaaaaaa

SEQ ID NO: 162 - protein, 268 aa, Homo sapiens [sequence omitted]

SEQ ID NO: 163 - DNA, 1938 bp, Homo sapoens
gactttggtggcaagaggagctggcggagcccagccagtgggcggggccaggggaggggcgggcaggtaggtgcagccactcctgggaggaccctgcgtggccagacggtgctggtgactcgtccacactgctcgcttcggatactccaggcgtctcccgttgcggccgctccctgccttagaggccagccttggacacttgctgcccctttccagcccggattctgggatccttccctctgagccaacatctgggtcctgccttcgacaccaccccaaggcttcctaccttgcgtgcctggagtctgccccaggggcccttgtcctgggccatggcccagaagggggtcctggggcctgggcagctgggggctgtggccattctgctctatcttggattactccggtcggggacaggagcggaaggggcagaagctccctgcggtgtggccccccaagcacgcatcacaggtggcagcagtgcagtcgccggtcagtggccctggcaggtcagcatcacctatgaaggcgtccatgtgtgtggtggctctctcgtgtctgagcagtgggtgctgtcagctgctcactgcttccccagcgagcaccacaaggaagcctatgaggtcaagctgggggcccaccagctagactcctactccgaggacgccaaggtcagcaccctgaaggacatcatcccccaccccagctacctccaggagggctcccagggcgacattgcactcctccaactcagcagacccatcaccttctcccgctacatccggcccatctgcctccctgcagccaacgcctccttccccaacggcctccactgcactgtcactggctggggtcatgtggccccctcagtgagcctcctgacgcccaagccactgcagcaactcgaggtgcctctgatcagtcgtgagacgtgtaactgcctgtacaacatcgacgccaagcctgaggagccgcactttgtccaagaggacatggtgtgtgctggctatgtggaggggggcaaggacgcctgccagggtgactctgggggcccactctcctgccctgtggagggtctctggtacctgacgggcattgtgagctggggagatgcctgtggggcccgcaacaggcctggtgtgtacactctggcctccagctatgcctcctggatccaaagcaaggtgacagaactccagcctcgtgtggtgccccaaacccaggagtcccagcccgacagcaacctctgtggcagccacctggccttcagctctgccccagcccagggcttgctgaggcccatccttttcctgcctctgggcctggctctgggcctcctctccccatggctcagcgagcactgagctggccctacttccaggatggatgcatcacactcaaggacaggagcctggtccttccctgatggcctttggacccagggcctgacttgagccactccttccttcaggactctgcgggaggctggggccccatcttgatctttgagcccattcttctgggtgtgctttttgggaccatcactgagagtcaggagttttactgcctgtagcaatggccagagcctctggcccctcacccaccatggaccagcccattggccgagctcctggggagctcctgggacccttggctatgaaaatgagccctggctcccacctgtttctggaagactgctcccggcccgcctgcccagactgatgagcacatctctctgccctctccctgtgttctgggctggggccacctttgtgcagcttcgaggacaggaaaggccccaatcttgcccactggccgctgagcgcccccgagccctgactcctggactccggaggactgagcccccaccggaactgggctggcgcttggatctggggtgggagtaacagggcagaaatgattaaaatgtttgagcac

SEQ ID NO: 164 - protein, 343 aa, Homo sapiens
MAQKGVLGPGQLGAVAILLYLGLLRSGTGAEGAEAPCGVAPQARITGGSSAVAGQWPWQVSITYEGVHVCGGSLVSEQWVLSAAHCFPSEHHKEAYEVKLGAHQLDSYSEDAKVSTLKDIIPHPSYLQEGSQGDIALLQLSRPITFSRYIRPICLPAANASFPNGLHCTVTGWGHVAPSVSLLTPKPLQQLEVPLISRETCNCLYNIDAKPEEPHFVQEDMVCAGYVEGGKDACQGDSGGPLSCPVEGLWYLTGIVSWGDACGARNRPGVYTLASSYASWIQSKVTELQPRVVPQTQESQPDSNLCGSHLAFSSAPAQGLLRPILFLPLGLALGLLSPWLSEH

SEQ ID NO: 165 - DNA, 874 bp, Homo sapiens
agttcctccacctgctggcccctggacacctctgtcaccatgtggttcctggttctgtgcctcgccctgtccctgggggggactggtgctgcgcccccgattcagtcccggattgtgggaggctgggagtgtgagcagcattcccagccctggcaggcggctctgtaccatttcagcactttccagtgtgggggcatcctggtgcaccgccagtgggtgctcacagctgctcattgcatcagcgacaattaccagctctggctgggtcgccacaacttgtttgacgacgaaaacacagcccagtttgttcatgtcagtgagagcttcccacaccctggcttcaacatgagcctcctggagaaccacacccgccaagcagacgaggactacagccacgacctcatgctgctccgcctgacagagcctgctgataccatcacagatgctgtgaaggtcgtggagttgcccaccgaggaacccgaagtggggagcacctgtttggcttccggctggggcagcatcgaaccagagaatttctcatttccagatgatctccagtgtgtggacctcaaaatcctgcctaatgatgagtgcaaaaaagcccacgtccagaaggtgacagacttcatgctgtgtgtcggacacctggaaggtggcaaagacacctgtgtgggtgattcagggggcccgctgatgtgtgatggtgtgctccaaggtgtcacatcatggggctacgtcccttgtggcacccccaataagccttctgtcgccgtcagagtgctgtcttatgtgaagtggatcgaggacaccatagcggagaactcctgaacgcccagccctgtcccctacccccagtaaaatcaaatgtgcatcc

SEQ ID NO: 166 - protein, 262 aa, Homo sapiens
MWFLVLCLALSLGGTGAAPPIQSRIVGGWECEQHSQPWQAALYHFSTFQCGGILVHRQWVLTAAHCISDNYQLWLGRHNLFDDENTAQFVHVSESFPHPGFNMSLLENHTRQADEDYSHDLMLLRLTEPADTITDAVKVVELPTEEPEVGSTCLASGWGSIEPENFSFPDDLQCVDLKILPNDECKKAHVQKVTDFMLCVGHLEGGKDTCVGDSGGPLMCDGVLQGVTSWGYVPCGTPNKPSVAVRVLSYVKWIEDTIAENS

SEQ ID NO: 167 - DNA, 2855 bp, Homo sapiens
agccccaaactcaccacctggccgtggacacctgtgtcagcatgtgggacctggttctctccatcgccttgtctgtggggtgcactggtgccgtgcccctcatccagtctcggattgtgggaggctgggagtgtgagaagcattcccaaccctggcaggtggctgtgtacagtcatggatgggcacactgtgggggtgtcctggtgcacccccagtgggtgctcacagctgcccattgcctaaagaagaatagccaggtctggctgggtcggcacaacctgtttgagcctgaagacacaggccagagggtccctgtcagccacagcttcccacacccgctctacaatatgagccttctgaagcatcaaagccttagaccagatgaagactccagccatgacctcatgctgctccgcctgtcagagcctgccaagatcacagatgttgtgaaggtcctgggcctgcccacccaggagccagcactggggaccacctgctacgcctcaggctggggcagcatcgaaccagaggagttcttgcgccccaggagtcttcagtgtgtgagcctccatctcctgtccaatgacatgtgtgctagagcttactctgagaaggtgacagagttcatgttgtgtgctgggctctggacaggtggtaaagacacttgtgggggtgattctgggggtccacttgtctgtaatggtgtgcttcaaggtatcacatcatggggccctgagccatgtgccctgcctgaaaagcctgctgtgtacaccaaggtggtgcattaccggaagtggatcaaggacaccatcgcagccaacccctgagtgcccctgtcccacccctacctctagtaaatttaagtccacctcacgttctggcatcacttggcctttctggatgctggacacctgaagcttggaactcacctggccgaagctcgagcctcctgagtcctactgacctgtgctttctggtgtggagtccagggctgctaggaaaaggaatgggcagacacaggtgtatgccaatgtttctgaaatgggtataatttcgtcctctccttcggaacactggctgtctctgaagacttctcgctcagtttcagtgaggacacacacaaagacgtgggtgaccatgttgtttgtggggtgcagagatgggaggggtggggcccaccctggaagagtggacagtgacacaaggtggacactctctacagatcactgaggataagctggagccacaatgcatgaggcacacacacagcaaggatgacgctgtaaacatagcccacgctgtcctgggggcactgggaagcctagataaggccgtgagcagaaagaaggggaggatcctcctatgttgttgaaggagggactagggggagaaactgaaagctgattaattacaggaggtttgttcaggtcccccaaaccaccgtcagatttgatgatttcctagcaggacttacagaaataaagagctatcatgctgtggtttattatggtttgttacattgatgggatacatactgaaatcagcaaacaaaacagatgtatagattagagtgtggagaaaacagaggaaaacttgcagttacgaagactggcaacttggctttactaagttttcagactggcaggaagtcaaacctattaggctgaggaccttgtggagtgtagctgatccagctgatagaggaactagccaggtgggggcctttccctttggatggggggcatatctgacagttattctctccaagtggagacttacggacagcatataattctccctgcaaggatgtatgataatatgtacaaagtaattccaactgaggaagctcacctgatccttagtgtccaaggtttttactgggggtctgtaggacgagtatggagtacttgaataattgacctgaagtcctcagacctgaggttccctagagttcaaacagatacagcatggtccagagtcccagatgtacaaaaacagggattcatcacaaatcccatctttagcatgaagggtctggcatggcccaaggccccaagtatatcaaggcacttgggcagaacatgccaaggaatcaaatgtcatctcccaggagttattcaagggtgagccctttacttgggatgtacaggctttgagcagtgcagggctgctgagtcaaccttttattgtacaggggatgagggaaagggagaggatgaggaagcccccctggggatttggtttggtcttgtgatcaggtggtctatggggctatccctacaaagaagaatccagaaataggggcacattgaggaatgatactgagcccaaagagcattcaatcattgttttatttgccttcttttcacaccattggtgagggagggattaccaccctggggttatgaagatggttgaacaccccacacatagcaccggagatatgagatcaacagtttcttagccatagagattcacagcccagagcaggaggacgctgcacaccatgcaggatgacatgggggatgcgctcgggattggtgtgaagaagcaaggactgttagaggcaggctttatagtaacaagacggtggggcaaactctgatttccgtgggggaatgtcatggtcttgctttactaagttttgagactggcaggtagtgaaactcattaggctgagaaccttgtggaatgcagctgacccagctgatagaggaagtagccaggtgggagcctttcccagtgggtgtgggacatatctggcaagattttgtggcactcctggttacagatactggggcagcaaataaaactgaatcttgttttcagaccttaaaaaaaaaaaaaaaaaaaaa

SEQ ID NO: 168 - protein, 261 aa, Homo sapiens
MWDLVLSIALSVGCTGAVPLIQSRIVGGWECEKHSQPWQVAVYSHGWAHCGGVLVHPQWVLTAAHCLKKNSQVWLGRHNLFEPEDTGQRVPVSHSFPHPLYNMSLLKHQSLRPDEDSSHDLMLLRLSEPAKITDVVKVLGLPTQEPALGTTCYASGWGSIEPEEFLRPRSLQCVSLHLLSNDMCARAYSEKVTEFMLCAGLWTGGKDTCGGDSGGPLVCNGVLQGITSWGPEPCALPEKPAVYTKVVHYRKWIKDTIAANP

SEQ ID NO: 169 - DNA, 2892 bp, Homo sapiens
agccccaaactcaccacctggccgtggacacctgtgtcagcatgtgggacctggttctctccatcgccttgtctgtggggtgcactggtgccgtgcccctcatccagtctcggattgtgggaggctgggagtgtgagaagcattcccaaccctggcaggtggctgtgtacagtcatggatgggcacactgtgggggtgtcctggtgcacccccagtgggtgctcacagctgcccattgcctaaagaagaatagccaggtctggctgggtcggcacaacctgtttgagcctgaagacacaggccagagggtccctgtcagccacagcttcccacacccgctctacaatatgagccttctgaagcatcaaagccttagaccagatgaagactccagccatgacctcatgctgctccgcctgtcagagcctgccaagatcacagatgttgtgaaggtcctgggcctgcccacccaggagccagcactggggaccacctgctacgcctcaggctggggcagcatcgaaccagaggagttcttgcgccccaggagtcttcagtgtgtgagcctccatctcctgtccaatgacatgtgtgctagagcttactctgagaaggtgacagagttcatgttgtgtgctgggctctggacaggtggtaaagacacttgtggggtgagtcatccctactcccaacatctggaggggaaagggtgattctgggggtccacttgtctgtaatggtgtgcttcaaggtatcacatcatggggccctgagccatgtgccctgcctgaaaagcctgctgtgtacaccaaggtggtgcattaccggaagtggatcaaggacaccatcgcagccaacccctgagtgcccctgtcccacccctacctctagtaaatttaagtccacctcacgttctggcatcacttggcctttctggatgctggacacctgaagcttggaactcacctggccgaagctcgagcctcctgagtcctactgacctgtgctttctggtgtggagtccagggctgctaggaaaaggaatgggcagacacaggtgtatgccaatgtttctgaaatgggtataatttcgtcctctccttcggaacactggctgtctctgaagacttctcgctcagtttcagtgaggacacacacaaagacgtgggtgaccatgttgtttgtggggtgcagagatgggaggggtggggcccaccctggaagagtggacagtgacacaaggtggacactctctacagatcactgaggataagctggagccacaatgcatgaggcacacacacagcaaggatgacgctgtaaacatagcccacgctgtcctgggggcactgggaagcctagataaggccgtgagcagaaagaaggggaggatcctcctatgttgttgaaggagggactagggggagaaactgaaagctgattaattacaggaggtttgttcaggtcccccaaaccaccgtcagatttgatgatttcctagcaggacttacagaaataaagagctatcatgctgtggtttattatggtttgttacattgatgggatacatactgaaatcagcaaacaaaacagatgtatagattagagtgtggagaaaacagaggaaaacttgcagttacgaagactggcaacttggctttactaagttttcagactggcaggaagtcaaacctattaggctgaggaccttgtggagtgtagctgatccagctgatagaggaactagccaggtgggggcctttccctttggatggggggcatatctgacagttattctctccaagtggagacttacggacagcatataattctccctgcaaggatgtatgataatatgtacaaagtaattccaactgaggaagctcacctgatccttagtgtccaaggtttttactgggggtctgtaggacgagtatggagtacttgaataattgacctgaagtcctcagacctgaggttccctagagttcaaacagatacagcatggtccagagtcccagatgtacaaaaacagggattcatcacaaatcccatctttagcatgaagggtctggcatggcccaaggccccaagtatatcaaggcacttgggcagaacatgccaaggaatcaaatgtcatctcccaggagttattcaagggtgagccctttacttgggatgtacaggctttgagcagtgcagggctgctgagtcaaccttttattgtacaggggatgagggaaagggagaggatgaggaagcccccctggggatttggtttggtcttgtgatcaggtggtctatggggctatccctacaaagaagaatccagaaataggggcacattgaggaatgatactgagcccaaagagcattcaatcattgttttatttgccttcttttcacaccattggtgagggagggattaccaccctggggttatgaagatggttgaacaccccacacatagcaccggagatatgagatcaacagtttcttagccatagagattcacagcccagagcaggaggacgctgcacaccatgcaggatgacatgggggatgcgctcgggattggtgtgaagaagcaaggactgttagaggcaggctttatagtaacaagacggtggggcaaactctgatttccgtgggggaatgtcatggtcttgctttactaagttttgagactggcaggtagtgaaactcattaggctgagaaccttgtggaatgcagctgacccagctgatagaggaagtagccaggtgggagcctttcccagtgggtgtgggacatatctggcaagattttgtggcactcctggttacagatactggggcagcaaataaaactgaatcttgttttcagaccttaaaaaaaaaaaaaaaaaaaaa

SEQ ID NO: 170 - protein, 223 aa, Homo sapiens
MWDLVLSIALSVGCTGAVPLIQSRIVGGWECEKHSQPWQVAVYSHGWAHCGGVLVHPQWVLTAAHCLKKNSQVWLGRHNLFEPEDTGQRVPVSHSFPHPLYNMSLLKHQSLRPDEDSSHDLMLLRLSEPAKITDVVKVLGLPTQEPALGTTCYASGWGSIEPEEFLRPRSLQCVSLHLLSNDMCARAYSEKVTEFMLCAGLWTGGKDTCGVSHPYSQHLEGKG

SEQ ID NO: 171 - DNA, 2879 bp, Homo sapiens
agccccaaactcaccacctggccgtggacacctgtgtcagcatgtgggacctggttctctccatcgccttgtctgtggggtgcactggtgccgtgcccctcatccagtctcggattgtgggaggctgggagtgtgagaagcattcccaaccctggcaggtggctgtgtacagtcatggatgggcacactgtgggggtgtcctggtgcacccccagtgggtgctcacagctgcccattgcctaaagaagaatagccaggtctggctgggtcggcacaacctgtttgagcctgaagacacaggccagagggtccctgtcagccacagcttcccacacccgctctacaatatgagccttctgaagcatcaaagccttagaccagatgaagactccagccatgacctcatgctgctccgcctgtcagagcctgccaagatcacagatgttgtgaaggtcctgggcctgcccacccaggagccagcactggggaccacctgctacgcctcaggctggggcagcatcgaaccagaggagtgagtcttcagtgtgtgagcctccatctcctgtccaatgacatgtgtgctagagcttactctgagaaggtgacagagttcatgttgtgtgctgggctctggacaggtggtaaagacacttgtggggtgagtcatccctactcccaacatctggaggggaaagggtgattctgggggtccacttgtctgtaatggtgtgcttcaaggtatcacatcatggggccctgagccatgtgccctgcctgaaaagcctgctgtgtacaccaaggtggtgcattaccggaagtggatcaaggacaccatcgcagccaacccctgagtgcccctgtcccacccctacctctagtaaatttaagtccacctcacgttctggcatcacttggcctttctggatgctggacacctgaagcttggaactcacctggccgaagctcgagcctcctgagtcctactgacctgtgctttctggtgtggagtccagggctgctaggaaaaggaatgggcagacacaggtgtatgccaatgtttctgaaatgggtataatttcgtcctctccttcggaacactggctgtctctgaagacttctcgctcagtttcagtgaggacacacacaaagacgtgggtgaccatgttgtttgtggggtgcagagatgggaggggtggggcccaccctggaagagtggacagtgacacaaggtggacactctctacagatcactgaggataagctggagccacaatgcatgaggcacacacacagcaaggatgacgctgtaaacatagcccacgctgtcctgggggcactgggaagcctagataaggccgtgagcagaaagaaggggaggatcctcctatgttgttgaaggagggactagggggagaaactgaaagctgattaattacaggaggtttgttcaggtcccccaaaccaccgtcagatttgatgatttcctagcaggacttacagaaataaagagctatcatgctgtggtttattatggtttgttacattgatgggatacatactgaaatcagcaaacaaaacagatgtatagattagagtgtggagaaaacagaggaaaacttgcagttacgaagactggcaacttggctttactaagttttcagactggcaggaagtcaaacctattaggctgaggaccttgtggagtgtagctgatccagctgatagaggaactagccaggtgggggcctttccctttggatggggggcatatctgacagttattctctccaagtggagacttacggacagcatataattctccctgcaaggatgtatgataatatgtacaaagtaattccaactgaggaagctcacctgatccttagtgtccaaggtttttactgggggtctgtaggacgagtatggagtacttgaataattgacctgaagtcctcagacctgaggttccctagagttcaaacagatacagcatggtccagagtcccagatgtacaaaaacagggattcatcacaaatcccatctttagcatgaagggtctggcatggcccaaggccccaagtatatcaaggcacttgggcagaacatgccaaggaatcaaatgtcatctcccaggagttattcaagggtgagccctttacttgggatgtacaggctttgagcagtgcagggctgctgagtcaaccttttattgtacaggggatgagggaaagggagaggatgaggaagcccccctggggatttggtttggtcttgtgatcaggtggtctatggggctatccctacaaagaagaatccagaaataggggcacattgaggaatgatactgagcccaaagagcattcaatcattgttttatttgccttcttttcacaccattggtgagggagggattaccaccctggggttatgaagatggttgaacaccccacacatagcaccggagatatgagatcaacagtttcttagccatagagattcacagcccagagcaggaggacgctgcacaccatgcaggatgacatgggggatgcgctcgggattggtgtgaagaagcaaggactgttagaggcaggctttatagtaacaagacggtggggcaaactctgatttccgtgggggaatgtcatggtcttgctttactaagttttgagactggcaggtagtgaaactcattaggctgagaaccttgtggaatgcagctgacccagctgatagaggaagtagccaggtgggagcctttcccagtgggtgtgggacatatctggcaagattttgtggcactcctggttacagatactggggcagcaaataaaactgaatcttgttttcagaccttaaaaaaaaaaaaaaaaaaaaa

SEQ ID NO: 172 - protein, 164 aa, Homo sapiens
MWDLVLSIALSVGCTGAVPLIQSRIVGGWECEKHSQPWQVAVYSHGWAHCGGVLVHPQWVLTAAHCLKKNSQVWLGRHNLFEPEDTGQRVPVSHSFPHPLYNMSLLKHQSLRPDEDSSHDLMLLRLSEPAKITDVVKVLGLPTQEPALGTTCYASGWGSIEPEE

SEQ ID NO: 173 - DNA, 1464 bp, Homo sapiens
agccccaagcttaccacctgcacccggagagctgtgtcaccatgtgggtcccggttgtcttcctcaccctgtccgtgacgtggattggtgctgcacccctcatcctgtctcggattgtgggaggctgggagtgcgagaagcattcccaaccctggcaggtgcttgtggcctctcgtggcagggcagtctgcggcggtgttctggtgcacccccagtgggtcctcacagctgcccactgcatcaggaacaaaagcgtgatcttgctgggtcggcacagcctgtttcatcctgaagacacaggccaggtatttcaggtcagccacagcttcccacacccgctctacgatatgagcctcctgaagaatcgattcctcaggccaggtgatgactccagccacgacctcatgctgctccgcctgtcagagcctgccgagctcacggatgctgtgaaggtcatggacctgcccacccaggagccagcactggggaccacctgctacgcctcaggctggggcagcattgaaccagaggagttcttgaccccaaagaaacttcagtgtgtggacctccatgttatttccaatgacgtgtgtgcgcaagttcaccctcagaaggtgaccaagttcatgctgtgtgctggacgctggacagggggcaaaagcacctgctcgggtgattctgggggcccacttgtctgtaatggtgtgcttcaaggtatcacgtcatggggcagtgaaccatgtgccctgcccgaaaggccttccctgtacaccaaggtggtgcattaccggaagtggatcaaggacaccatcgtggccaacccctgagcacccctatcaaccccctattgtagtaaacttggaaccttggaaatgaccaggccaagactcaagcctccccagttctactgacctttgtccttaggtgtgaggtccagggttgctaggaaaagaaatcagcagacacaggtgtagaccagagtgtttcttaaatggtgtaattttgtcctctctgtgtcctggggaatactggccatgcctggagacatatcactcaatttctctgaggacacagataggatggggtgtctgtgttatttgtggggtacagagatgaaagaggggtgggatccacactgagagagtggagagtgacatgtgctggacactgtccatgaagcactgagcagaagctggaggcacaacgcaccagacactcacagcaaggatggagctgaaaacataacccactctgtcctggaggcactgggaagcctagagaaggctgtgagccaaggagggagggtcttcctttggcatgggatggggatgaagtaaggagagggactggaccccctggaagctgattcactatggggggaggtgtattgaagtcctccagacaaccctcagatttgatgatttcctagtagaactcacagaaataaagagctgttatactgtg

SEQ ID NO: 174 - protein, 261 aa, Homo sapiens
MWVPVVFLTLSVTWIGAAPLILSRIVGGWECEKHSQPWQVLVASRGRAVCGGVLVHPQWVLTAAHCIRNKSVILLGRHSLFHPEDTGQVFQVSHSFPHPLYDMSLLKNRFLRPGDDSSHDLMLLRLSEPAELTDAVKVMDLPTQEPALGTTCYASGWGSIEPEEFLTPKKLQCVDLHVISNDVCAQVHPQKVTKFMLCAGRWTGGKSTCSGDSGGPLVCNGVLQGITSWGSEPCALPERPSLYTKVVHYRKWIKDTIVANP

SEQ ID NO: 175 - DNA, 1906 bp, Homo sapiens
agccccaagcttaccacctgcacccggagagctgtgtcaccatgtgggtcccggttgtcttcctcaccctgtccgtgacgtggattggtgctgcacccctcatcctgtctcggattgtgggaggctgggagtgcgagaagcattcccaaccctggcaggtgcttgtggcctctcgtggcagggcagtctgcggcggtgttctggtgcacccccagtgggtcctcacagctgcccactgcatcaggaacaaaagcgtgatcttgctgggtcggcacagcctgtttcatcctgaagacacaggccaggtatttcaggtcagccacagcttcccacacccgctctacgatatgagcctcctgaagaatcgattcctcaggccaggtgatgactccagccacgacctcatgctgctccgcctgtcagagcctgccgagctcacggatgctgtgaaggtcatggacctgcccacccaggagccagcactggggaccacctgctacgcctcaggctggggcagcattgaaccagaggagttcttgaccccaaagaaacttcagtgtgtggacctccatgttatttccaatgacgtgtgtgcgcaagttcaccctcagaaggtgaccaagttcatgctgtgtgctggacgctggacagggggcaaaagcacctgctcgtgggtcattctgatcaccgaactgaccatgccagccctgccgatggtcctccatggctccctagtgccctggagaggaggtgtctagtcagagagtagtcctggaaggtggcctctgtgaggagccacggggacagcatcctgcagatggtcctggcccttgtcccaccgacctgtctacaaggactgtcctcgtggaccctcccctctgcacaggagctggaccctgaagtcccttccccaccggccaggactggagcccctacccctctgttggaatccctgcccaccttcttctggaagtcggctctggagacatttctctcttcttccaaagctgggaactgctatctgttatctgcctgtccaggtctgaaagataggattgcccaggcagaaactgggactgacctatctcactctctccctgcttttacccttagggtgattctgggggcccacttgtctgtaatggtgtgcttcaaggtatcacgtcatggggcagtgaaccatgtgccctgcccgaaaggccttccctgtacaccaaggtggtgcattaccggaagtggatcaaggacaccatcgtggccaacccctgagcacccctatcaaccccctattgtagtaaacttggaaccttggaaatgaccaggccaagactcaagcctccccagttctactgacctttgtccttaggtgtgaggtccagggttgctaggaaaagaaatcagcagacacaggtgtagaccagagtgtttcttaaatggtgtaattttgtcctctctgtgtcctggggaatactggccatgcctggagacatatcactcaatttctctgaggacacagataggatggggtgtctgtgttatttgtggggtacagagatgaaagaggggtgggatccacactgagagagtggagagtgacatgtgctggacactgtccatgaagcactgagcagaagctggaggcacaacgcaccagacactcacagcaaggatggagctgaaaacataacccactctgtcctggaggcactgggaagcctagagaaggctgtgagccaaggagggagggtcttcctttggcatgggatggggatgaagtaaggagagggactggaccccctggaagctgattcactatggggggaggtgtattgaagtcctccagacaaccctcagatttgatgatttcctagtagaactcacagaaataaagagctgttatactgtg

SEQ ID NO: 176 - protein, 238 aa, Homo sapiens
MWVPVVFLTLSVTWIGAAPLILSRIVGGWECEKHSQPWQVLVASRGRAVCGGVLVHPQWVLTAAHCIRNKSVILLGRHSLFHPEDTGQVFQVSHSFPHPLYDMSLLKNRFLRPGDDSSHDLMLLRLSEPAELTDAVKVMDLPTQEPALGTTCYASGWGSIEPEEFLTPKKLQCVDLHVISNDVCAQVHPQKVTKFMLCAGRWTGGKSTCSWVILITELTMPALPMVLHGSLVPWRGGV

SEQ ID NO: 177 - DNA, 1335 bp, Homo sapiens
agccccaagcttaccacctgcacccggagagctgtgtcaccatgtgggtcccggttgtcttcctcaccctgtccgtgacgtggattggtgctgcacccctcatcctgtctcggattgtgggaggctgggagtgcgagaagcattcccaaccctggcaggtgcttgtggcctctcgtggcagggcagtctgcggcggtgttctggtgcacccccagtgggtcctcacagctgcccactgcatcaggaagccaggtgatgactccagccacgacctcatgctgctccgcctgtcagagcctgccgagctcacggatgctgtgaaggtcatggacctgcccacccaggagccagcactggggaccacctgctacgcctcaggctggggcagcattgaaccagaggagttcttgaccccaaagaaacttcagtgtgtggacctccatgttatttccaatgacgtgtgtgcgcaagttcaccctcagaaggtgaccaagttcatgctgtgtgctggacgctggacagggggcaaaagcacctgctcgggtgattctgggggcccacttgtctgtaatggtgtgcttcaaggtatcacgtcatggggcagtgaaccatgtgccctgcccgaaaggccttccctgtacaccaaggtggtgcattaccggaagtggatcaaggacaccatcgtggccaacccctgagcacccctatcaaccccctattgtagtaaacttggaaccttggaaatgaccaggccaagactcaagcctccccagttctactgacctttgtccttaggtgtgaggtccagggttgctaggaaaagaaatcagcagacacaggtgtagaccagagtgtttcttaaatggtgtaattttgtcctctctgtgtcctggggaatactggccatgcctggagacatatcactcaatttctctgaggacacagataggatggggtgtctgtgttatttgtggggtacagagatgaaagaggggtgggatccacactgagagagtggagagtgacatgtgctggacactgtccatgaagcactgagcagaagctggaggcacaacgcaccagacactcacagcaaggatggagctgaaaacataacccactctgtcctggaggcactgggaagcctagagaaggctgtgagccaaggagggagggtcttcctttggcatgggatggggatgaagtaaggagagggactggaccccctggaagctgattcactatggggggaggtgtattgaagtcctccagacaaccctcagatttgatgatttcctagtagaactcacagaaataaagagctgttatactgtg

SEQ ID NO: 178 - protein, 218 aa, Homo sapiens
MWVPVVFLTLSVTWIGAAPLILSRIVGGWECEKHSQPWQVLVASRGRAVCGGVLVHPQWVLTAAHCIRKPGDDSSHDLMLLRLSEPAELTDAVKVMDLPTQEPALGTTCYASGWGSIEPEEFLTPKKLQCVDLHVISNDVCAQVHPQKVTKFMLCAGRWTGGKSTCSGDSGGPLVCNGVLQGITSWGSEPCALPERPSLYTKVVHYRKWIKDTIVANP

SEQ ID NO: 179 - DNA, 1341 bp, Homo sapiens
agccccaagcttaccacctgcacccggagagctgtgtcaccatgtgggtcccggttgtcttcctcaccctgtccgtgacgtggattggtgctgcacccctcatcctgtctcggattgtgggaggctgggagtgcgagaagcattcccaaccctggcaggtgcttgtggcctctcgtggcagggcagtctgcggcggtgttctggtgcacccccagtgggtcctcacagctgcccactgcatcaggaacaaaagcgtgatcttgctgggtcggcacagcctgtttcatcctgaagacacaggccaggtatttcaggtcagccacagcttcccacacccgctctacgatatgagcctcctgaagaatcgattcctcaggccaggtgatgactccagcattgaaccagaggagttcttgaccccaaagaaacttcagtgtgtggacctccatgttatttccaatgacgtgtgtgcgcaagttcaccctcagaaggtgaccaagttcatgctgtgtgctggacgctggacagggggcaaaagcacctgctcgggtgattctgggggcccacttgtctgtaatggtgtgcttcaaggtatcacgtcatggggcagtgaaccatgtgccctgcccgaaaggccttccctgtacaccaaggtggtgcattaccggaagtggatcaaggacaccatcgtggccaacccctgagcacccctatcaaccccctattgtagtaaacttggaaccttggaaatgaccaggccaagactcaagcctccccagttctactgacctttgtccttaggtgtgaggtccagggttgctaggaaaagaaatcagcagacacaggtgtagaccagagtgtttcttaaatggtgtaattttgtcctctctgtgtcctggggaatactggccatgcctggagacatatcactcaatttctctgaggacacagataggatggggtgtctgtgttatttgtggggtacagagatgaaagaggggtgggatccacactgagagagtggagagtgacatgtgctggacactgtccatgaagcactgagcagaagctggaggcacaacgcaccagacactcacagcaaggatggagctgaaaacataacccactctgtcctggaggcactgggaagcctagagaaggctgtgagccaaggagggagggtcttcctttggcatgggatggggatgaagtaaggagagggactggaccccctggaagctgattcactatggggggaggtgtattgaagtcctccagacaaccctcagatttgatgatttcctagtagaactcacagaaataaagagctgttatactgtg

SEQ ID NO: 180 - protein, 220 aa, Homo sapiens
MWVPVVFLTLSVTWIGAAPLILSRIVGGWECEKHSQPWQVLVASRGRAVCGGVLVHPQWVLTAAHCIRNKSVILLGRHSLFHPEDTGQVFQVSHSFPHPLYDMSLLKNRFLRPGDDSSIEPEEFLTPKKLQCVDLHVISNDVCAQVHPQKVTKFMLCAGRWTGGKSTCSGDSGGPLVCNGVLQGITSWGSEPCALPERPSLYTKVVHYRKWIKDTIVANP

SEQ ID NO: 181 - DNA, 555 bp, Homo sapiens
agccccaagcttaccacctgcacccggagagctgtgtcaccatgtgggtcccggttgtcttcctcaccctgtccgtgacgtggattggtgctgcacccctcatcctgtctcggattgtgggaggctgggagtgcgagaagcattcccaaccctggcaggtgcttgtggcctctcgtggcagggcagtctgcggcggtgttctggtgcacccccagtgggtcctcacagctgcccactgcatcaggaagtgagtaggggcctggggtctggggagcaggtgtctgtgtcccagaggaataacagctgggcattttccccaggataacctctaaggccagccttgggactgggggagagagggaaagttctggttcaggtcacatggggaggcagggttggggctggaccaccctccccatggctgcctgggtctccatctgtgttcctctatgtctctttgtgtcgctttcattatgtctcttggtaactggcttcggttgtgtctctccgtgtgactattttgttctctctctccctctcttctctgtcttcagt

SEQ ID NO: 182 - protein, 69 aa, Homo sapiens
MWVPVVFLTLSVTWIGAAPLILSRIVGGWECEKHSQPWQVLVASRGRAVCGGVLVHPQWVLTAAHCIRK

SEQ ID NO: 183 - DNA, 807 bp, Homo sapiens
acactctaccaccatgaatccattcctgatccttgcctttgtgggagctgctgttgctgtcccctttgacgatgatgacaagattgttgggggctacacctgtgaggagaattctctcccctaccaggtgtccctgaattctggctcccacttctgcggtggctccctcatcagcgaacagtgggtggtatcagcagctcactgctacaagacccgcatccaggtgagactgggagagcacaacatcaaagtcctggaggggaatgagcagttcatcaatgcggccaagatcatccgccaccctaaatacaacagggacactctggacaatgacatcatgctgatcaaactctcctcacctgccgtcatcaatgcccgcgtgtccaccatctctctgcccaccgcccctccagctgctggcactgagtgcctcatctccggctggggcaacactctgagctttggtgctgactacccagacgagctgaagtgcctggatgctccggtgctgacccaggctgagtgtaaagcctcctaccctggaaagattaccaacagcatgttctgtgtgggcttccttgagggaggcaaggattcctgccagcgtgactctggtggccctgtggtctgcaacggacagctccaaggagttgtctcctggggccatggctgtgcctggaagaacaggcctggagtctacaccaaggtctacaactatgtggactggattaaggacaccatcgctgccaacagctaaagcccccggtccctctgcagtctctataccaataaagtggccctgctctc

SEQ ID NO: 184 - protein, 247 aa, Homo sapiens
MNPFLILAFVGAAVAVPFDDDDKIVGGYTCEENSLPYQVSLNSGSHFCGGSLISEQWVVSAAHCYKTRIQVRLGEHNIKVLEGNEQFINAAKIIRHPKYNRDTLDNDIMLIKLSSPAVINARVSTISLPTAPPAAGTECLISGWGNTLSFGADYPDELKCLDAPVLTQAECKASYPGKITNSMFCVGFLEGGKDSCQRDSGGPVVCNGQLQGVVSWGHGCAWKNRPGVYTKVYNYVDWIKDTIAANS

SEQ ID NO: 185 - DNA, 1055 bp, Homo sapiens
acctgcatttccaccacctgttctgggagtggggcccagtcagccccctttgcttaccttctgccctatattagagccccaggttctgtgcccttttcctatcatcgcaaaactcatgatgctccggctgctcagttccctcctccttgtggccgttgcctcaggctatggcccaccttcctctcgcccttccagccgcgttgtcaatggtgaggatgcggtcccctacagctggccctggcaggtttccctgcagtatgagaaaagcggaagcttctaccacacctgtggcggtagcctcatcgcccccgactgggttgtgactgccggccactgcatctcgagctcccggacctaccaggtggtgttgggcgagtacgaccgtgctgtgaaggagggccccgagcaggtgatccccatcaactctggggacctctttgtgcatccactctggaaccgctcgtgtgtggcctgtggcaatgacatcgccctcatcaagctctcacgcagcgcccagctgggagacgccgtccagctcgcctcactccctccggctggtgacatccttcccaacgagacaccctgctacatcaccggctggggccgtctctataccaacgggccactcccagacaagctgcaggaggccctgctgccggtggtggactatgaacactgctccaggtggaactggtggggttcctccgtgaagaagaccatggtgtgtgctggaggggacatccgctccggctgcaatggtgactctggaggacccctcaactgccccacagaggatggtggctggcaggtccatggcgtgaccagctttgtttctgcctttggctgcaacacccgcaggaagcccacggtgttcactcgagtctccgccttcattgactggattgaggagaccatagcaagccactagaaccaaggcccagctggcagtgctgatcgatcccacatcctgaataaagaataaagatctctcagaaaattccaaaaaaaaaaaaaaaaaaaaaaaaaaaaaaaaaaaaaaaaaaaaaaaaaaaaaa

SEQ ID NO: 186 - protein, 270 aa, Homo sapiens
MMLRLLSSLLLVAVASGYGPPSSRPSSRVVNGEDAVPYSWPWQVSLQYEKSGSFYHTCGGSLIAPDWVVTAGHCISSSRTYQVVLGEYDRAVKEGPEQVIPINSGDLFVHPLWNRSCVACGNDIALIKLSRSAQLGDAVQLASLPPAGDILPNETPCYITGWGRLYTNGPLPDKLQEALLPVVDYEHCSRWNWWGSSVKKTMVCAGGDIRSGCNGDSGGPLNCPTEDGGWQVHGVTSFVSAFGCNTRRKPTVFTRVSAFIDWIEETIASH

SEQ ID NO: 187 - DNA, 941 bp, Homo sapiens
cttacagaactcccacggacacaccatgattaggaccctgctgctgtccactttggtggctggagccctcagttgtggggtctccacttacgcgcctgatatgtctaggatgcttggaggtgaagaagcgaggcccaacagctggccctggcaggtctccctgcagtacagctccaatggccagtggtaccacacctgcggagggtccctgatagccaacagctgggtcctgacggctgcccactgcatcagctcctccgggatctaccgcgtgatgctgggccagcataacctctacgttgcagagtccggctcgctggccgtcagtgtctctaagattgtggtgcacaaggactggaactccgaccaggtctccaaagggaacgacattgccctgctcaaactggctaaccccgtctccctcaccgacaagatccagctggcctgcctccctcctgccggcaccattctacccaacaactacccctgctacgtcacgggctggggaaggctgcagaccaacggggctctccctgatgacctgaagcagggccggttgctggttgtggactatgccacctgctccagctctggctggtggggcagcaccgtgaagacgaatatgatctgtgctgggggtgatggcgtgatatgcacctgcaacggagactccggtgggccgctgaactgtcaggcatctgacggccggtgggaggtgcatggcatcggcagcctcacgtcggtccttggttgcaactactactacaagccctccatcttcacgcgggtctccaactacaacgactggatcaattcggtgattgcaaataactaaccaaaagaagtccctgggactgtttcagacttggaaaggtcacagaaggaaaataatattatataaagtgacaactatgcaaatcacaaaaaaaaaaaaaaaaaaa

SEQ ID NO: 188 - protein, 269 aa, Homo sapiens
MIRTLLLSTLVAGALSCGVSTYAPDMSRMLGGEEARPNSWPWQVSLQYSSNGQWYHTCGGSLIANSWVLTAAHCISSSGIYRVMLGQHNLYVAESGSLAVSVSKIVVHKDWNSDQVSKGNDIALLKLANPVSLTDKIQLACLPPAGTILPNNYPCYVTGWGRLQTNGALPDDLKQGRLLVVDYATCSSSGWWGSTVKTNMICAGGDGVICTCNGDSGGPLNCQASDGRWEVHGIGSLTSVLGCNYYYKPSIFTRVSNYNDWINSVIANN

SEQ ID NO: 189 - DNA, 2048 bp, Homo sapiens
ctattgatctggactcctggataggcagctggaccaacggacggacgccatgagggctctgctgctcctggggttcctgctggtgagcttggagtcaacactttcgattccaccttgggaagcccccaaggagcataagtacaaagctgaagagcacacagtcgttctcactgtcaccggggagccctgccacttccccttccagtaccaccggcagctgtaccacaaatgtacccacaagggccggccaggccctcagccctggtgtgctaccacccccaactttgatcaggaccagcgatggggatactgtttggagcccaagaaagtgaaagaccactgcagcaaacacagcccctgccagaaaggagggacctgtgtgaacatgccaagcggcccccactgtctctgtccacaacacctcactggaaaccactgccagaaagagaagtgctttgagcctcagcttctccggtttttccacaagaatgagatatggtatagaactgagcaagcagctgtggccagatgccagtgcaagggtcctgatgcccactgccagcggctggccagccaggcctgccgcaccaacccgtgcctccatgggggtcgctgcctagaggtggagggccaccgcctgtgccactgcccggtgggctacaccggacccttctgcgacgtggacaccaaggcaagctgctatgatggccgcgggctcagctaccgcggcctggccaggaccacgctctcgggtgcgccctgtcagccgtgggcctcggaggccacctaccggaacgtgactgccgagcaagcgcggaactggggactgggcggccacgccttctgccggaacccggacaacgacatccgcccgtggtgcttcgtgctgaaccgcgaccggctgagctgggagtactgcgacctggcacagtgccagaccccaacccaggcggcgcctccgaccccggtgtcccctaggcttcatgtcccactcatgcccgcgcagccggcaccgccgaagcctcagcccacgacccggaccccgcctcagtcccagaccccgggagccttgccggcgaagcgggagcagccgccttccctgaccaggaacggcccactgagctgcgggcagcggctccgcaagagtctgtcttcgatgacccgcgtcgttggcgggctggtggcgctacgcggggcgcacccctacatcgccgcgctgtactggggccacagtttctgcgccggcagcctcatcgccccctgctgggtgctgacggccgctcactgcctgcaggaccggcccgcacccgaggatctgacggtggtgctcggccaggaacgccgtaaccacagctgtgagccgtgccagacgttggccgtgcgctcctaccgcttgcacgaggccttctcgcccgtcagctaccagcacgacctggctctgttgcgccttcaggaggatgcggacggcagctgcgcgctcctgtcgccttacgttcagccggtgtgcctgccaagcggcgccgcgcgaccctccgagaccacgctctgccaggtggccggctggggccaccagttcgagggggcggaggaatatgccagcttcctgcaggaggcgcaggtaccgttcctctccctggagcgctgctcagccccggacgtgcacggatcctccatcctccccggcatgctctgcgcagggttcctcgagggcggcaccgatgcgtgccagggtgattccggaggcccgctggtgtgtgaggaccaagctgcagagcgccggctcaccctgcaaggcatcatcagctggggatcgggctgtggtgaccgcaacaagccaggcgtctacaccgatgtggcctactacctggcctggatccgggagcacaccgtttcctgattgctcagggactcatctttccctccttggtgattccgcagtgagagagtggctggggcatggaaggcaagattgtgtcccattcccccagtgcggccagctccgcgccaggatggcgaggaactcaataaagtgctttgaaaatgctgag

SEQ ID NO: 190 - protein, 615 aa, Homo sapiens
MRALLLLGFLLVSLESTLSIPPWEAPKEHKYKAEEHTVVLTVTGEPCHFPFQYHRQLYHKCTHKGRPGPQPWCATTPNFDQDQRWGYCLEPKKVKDHCSKHSPCQKGGTCVNMPSGPHCLCPQHLTGNHCQKEKCFEPQLLRFFHKNEIWYRTEQAAVARCQCKGPDAHCQRLASQACRTNPCLHGGRCLEVEGHRLCHCPVGYTGPFCDVDTKASCYDGRGLSYRGLARTTLSGAPCQPWASEATYRNVTAEQARNWGLGGHAFCRNPDNDIRPWCFVLNRDRLSWEYCDLAQCQTPTQAAPPTPVSPRLHVPLMPAQPAPPKPQPTTRTPPQSQTPGALPAKREQPPSLTRNGPLSCGQRLRKSLSSMTRVVGGLVALRGAHPYIAALYWGHSFCAGSLIAPCWVLTAAHCLQDRPAPEDLTVVLGQERRNHSCEPCQTLAVRSYRLHEAFSPVSYQHDLALLRLQEDADGSCALLSPYVQPVCLPSGAARPSETTLCQVAGWGHQFEGAEEYASFLQEAQVPFLSLERCSAPDVHGSSILPGMLCAGFLEGGTDACQGDSGGPLVCEDQAAERRLTLQGIISWGSGCGDRNKPGVYTDVAYYLAWIREHTVS

SEQ ID NO: 191 - DNA, 2245 bp, Homo sapiens
agaacagcttgaagaccgttcatttttaagtgacaagagactcacctccaagaagcaattgtgttttcagaatgattttattcaagcaagcaacttatttcatttccttgtttgctacagtttcctgtggatgtctgactcaactctatgaaaacgccttcttcagaggtggggatgtagcttccatgtacaccccaaatgcccaatactgccagatgaggtgcacattccacccaaggtgtttgctattcagttttcttccagcaagttcaatcaatgacatggagaaaaggtttggttgcttcttgaaagatagtgttacaggaaccctgccaaaagtacatcgaacaggtgcagtttctggacattccttgaagcaatgtggtcatcaaataagtgcttgccatcgagacatttataaaggagttgatatgagaggagtcaattttaatgtgtctaaggttagcagtgttgaagaatgccaaaaaaggtgcaccaataacattcgctgccagtttttttcatatgccacgcaaacatttcacaaggcagagtaccggaacaattgcctattaaagtacagtcccggaggaacacctaccgctataaaggtgctgagtaacgtggaatctggattctcactgaagccctgtgccctttcagaaattggttgccacatgaacatcttccagcatcttgcgttctcagatgtggatgttgccagggttctcactccagatgcttttgtgtgtcggaccatctgcacctatcaccccaactgcctcttctttacattctatacaaatgtatggaaaatcgagtcacaaagaaatgtttgtcttcttaaaacatctgaaagtggcacaccaagttcctctactcctcaagaaaacaccatatctggatatagccttttaacctgcaaaagaactttacctgaaccctgccattctaaaatttacccgggagttgactttggaggagaagaattgaatgtgacttttgttaaaggagtgaatgtttgccaagagacttgcacaaagatgattcgctgtcagtttttcacttattctttactcccagaagactgtaaggaagagaagtgtaagtgtttcttaagattatctatggatggttctccaactaggattgcgtatgggacacaagggagctctggttactctttgagattgtgtaacactggggacaactctgtctgcacaacaaaaacaagcacacgcattgttggaggaacaaactcttcttggggagagtggccctggcaggtgagcctgcaggtgaagctgacagctcagaggcacctgtgtggagggtcactcataggacaccagtgggtcctcactgctgcccactgctttgatgggcttcccctgcaggatgtttggcgcatctatagtggcattttaaatctgtcagacattacaaaagatacacctttctcacaaataaaagagattattattcaccaaaactataaagtctcagaagggaatcatgatatcgccttgataaaactccaggctcctttgaattacactgaattccaaaaaccaatatgcctaccttccaaaggtgacacaagcacaatttataccaactgttgggtaaccggatggggcttctcgaaggagaaaggtgaaatccaaaatattctacaaaaggtaaatattcctttggtaacaaatgaagaatgccagaaaagatatcaagattataaaataacccaacggatggtctgtgctggctataaagaagggggaaaagatgcttgtaagggagattcaggtggtcccttagtttgcaaacacaacggaatgtggcgtttggtgggcatcacaagctggggtgaaggctgtgcccgcagggagcaacctggtgtctacaccaaagtcgctgagtacatggactggattttagagaaaacacagagcagtgatggaaaagctcagatgcagtcaccagcatgagaagcagtccagagtctaggcaatttttacaacctgagttcaagtcaaattctgagcctggggggtcctcatctgcaaagcatggagagtggcatcttctttgcatcctaaggacgaaagacacagtgcactcagagctgctgaggacaatgtctgctgaagcccgctttcagcacgccgtaaccaggggctgacaatgcgaggtcgcaactgagatctccatgactgtgtgttgtgaaataaaatggtgaaagatc

SEQ ID NO: 192 - protein, 638 aa, Homo sapiens
MILFKQATYFISLFATVSCGCLTQLYENAFFRGGDVASMYTPNAQYCQMRCTFHPRCLLFSFLPASSINDMEKRFGCFLKDSVTGTLPKVHRTGAVSGHSLKQCGHQISACHRDIYKGVDMRGVNFNVSKVSSVEECQKRCTNNIRCQFFSYATQTFHKAEYRNNCLLKYSPGGTPTAIKVLSNVESGFSLKPCALSEIGCHMNIFQHLAFSDVDVARVLTPDAFVCRTICTYHPNCLFFTFYTNVWKIESQRNVCLLKTSESGTPSSSTPQENTISGYSLLTCKRTLPEPCHSKIYPGVDFGGEELNVTFVKGVNVCQETCTKMIRCQFFTYSLLPEDCKEEKCKCFLRLSMDGSPTRIAYGTQGSSGYSLRLCNTGDNSVCTTKTSTRIVGGTNSSWGEWPWQVSLQVKLTAQRHLCGGSLIGHQWVLTAAHCFDGLPLQDVWRIYSGILNLSDITKDTPFSQIKEIIIHQNYKVSEGNHDIALIKLQAPLNYTEFQKPICLPSKGDTSTIYTNCWVTGWGFSKEKGEIQNILQKVNIPLVTNEECQKRYQDYKITQRMVCAGYKEGGKDACKGDSGGPLVCKHNGMWRLVGITSWGEGCARREQPGVYTKVAEYMDWILEKTQSSDGKAQMQSPA

SEQ ID NO: 193 - DNA, 2217 bp, Homo sapiens
tgctgtactgagagagaatgttacataacattgagaactagtacaagtaaatattaaagtgaagtgaccatttcctacacaagctcattcagaggaggatgaagaccattttggaggaagaaaagcacccttattaagaattgcagcaagtaagccaacaaggtcttttcaggatgattttcttatatcaagtggtacatttcattttatttacttcagtttctggtgaatgtgtgactcagttgttgaaggacacctgctttgaaggaggggacattactacggtcttcacaccaagcgccaagtactgccaggtagtctgcacttaccacccaagatgtttactcttcactttcacggcggaatcaccatctgaggatcccacccgatggtttacttgtgtcctgaaagacagtgttacagaaacactgccaagagtgaataggacagcagcgatttctgggtattctttcaagcaatgctcacaccaaataagcgcttgcaacaaagacatttatgtggacctagacatgaagggcataaactataacagctcagttgccaagagtgctcaagaatgccaagaaagatgcacggatgacgtccactgccactttttcacgtacgccacaaggcagtttcccagcctggagcatcgtaacatttgtctactgaagcacacccaaacagggacaccaaccagaataacgaagctcgataaagtggtgtctggattttcactgaaatcctgtgcactttctaatctggcttgtattagggacattttccctaatacggtgtttgcagacagcaacatcgacagtgtcatggctcccgatgcttttgtctgtggccgaatctgcactcatcatcccggttgcttgttttttaccttcttttcccaggaatggcccaaagaatctcaaagaaatctttgtctccttaaaacatctgagagtggattgcccagtacacgcattaaaaagagcaaagctctttctggtttcagtctacaaagctgcaggcacagcatcccagtgttctgccattcttcattttaccatgacactgatttcttgggagaagaactggatattgttgctgcaaaaagtcacgaggcctgccagaaactgtgcaccaatgccgtccgctgccagttttttacctataccccagcccaagcatcctgcaacgaagggaagggcaagtgttacttaaagctttcttcaaacggatctccaactaaaatacttcacgggagaggaggcatctctggatacacattaaggttgtgtaaaatggataatgagtgtaccaccaaaatcaagcccaggatcgttggaggaactgcgtctgttcgtggtgagtggccgtggcaggtgaccctgcacacaacctcacccactcagagacacctgtgtggaggctccatcattggaaaccagtggatattaacagccgctcactgtttctatggggtagagtcacctaagattttgcgtgtctacagtggcattttaaatcaatctgaaataaaagaggacacatctttctttggggttcaagaaataataatccatgatcagtataaaatggcagaaagcgggtatgatattgccttgttgaaactggaaaccacagtgaattacacagattctcaacgacccatatgcctgccttccaaaggagatagaaatgtaatatacactgattgctgggtgactggatgggggtacagaaaactaagagacaaaatacaaaatactctccagaaagccaagatacccttagtgaccaacgaagagtgccagaagagatacagaggacataaaataacccataagatgatctgtgccggctacagggaaggagggaaggacgcttgcaagggagattcgggaggccctctgtcctgcaaacacaatgaggtctggcatctggtaggcatcacgagctggggcgaaggctgtgctcaaagggagcggccaggtgtttacaccaacgtggtcgagtacgtggactggattctggagaaaactcaagcagtgtgaatgggttcccaggggccattggagtccctgaaggacccaggatttgctgggagagggtgttgagttcactgtgccagcatgcttcctccacagtaacacgctgaaggggcttggtgtttgtaagaaaatgctagaagaaaacaaactgtcacaagttgttatgtcc

SEQ ID NO: 194 - protein, 625 aa, Homo sapiens
MIFLYQVVHFILFTSVSGECVTQLLKDTCFEGGDITTVFTPSAKYCQVVCTYHPRCLLFTFTAESPSEDPTRWFTCVLKDSVTETLPRVNRTAAISGYSFKQCSHQISACNKDIYVDLDMKGINYNSSVAKSAQECQERCTDDVHCHFFTYATRQFPSLEHRNICLLKHTQTGTPTRITKLDKVVSGFSLKSCALSNLACIRDIFPNTVFADSNIDSVMAPDAFVCGRICTHHPGCLFFTFFSQEWPKESQRNLCLLKTSESGLPSTRIKKSKALSGFSLQSCRHSIPVFCHSSFYHDTDFLGEELDIVAAKSHEACQKLCTNAVRCQFFTYTPAQASCNEGKGKCYLKLSSNGSPTKILHGRGGISGYTLRLCKMDNECTTKIKPRIVGGTASVRGEWPWQVTLHTTSPTQRHLCGGSIIGNQWILTAAHCFYGVESPKILRVYSGILNQSEIKEDTSFFGVQEIIIHDQYKMAESGYDIALLKLETTVNYTDSQRPICLPSKGDRNVIYTDCWVTGWGYRKLRDKIQNTLQKAKIPLVTNEECQKRYRGHKITHKMICAGYREGGKDACKGDSGGPLSCKHNEVWHLVGITSWGEGCAQRERPGVYTNVVEYVDWILEKTQAV

SEQ ID NO: 195 - DNA, 2055 bp, Homo sapiens
tgctgtactgagagagaatgttacataacattgagaactagtacaagtaaatattaaagtgaagtgaccatttcctacacaagctcattcagaggaggatgaagaccattttggaggaagaaaagcacccttattaagaattgcagcaagtaagccaacaaggtcttttcaggatgattttcttatatcaagtggtacatttcattttatttacttcagtttctggtgaatgtgtgactcagttgttgaaggacacctgctttgaaggaggggacattactacggtcttcacaccaagcgccaagtactgccaggtagtctgcacttaccacccaagatgtttactcttcactttcacggcggaatcaccatctgaggatcccacccgatggtttacttgtgtcctgaaagacagtgttacagaaacactgccaagagtgaataggacagcagcgatttctgggtattctttcaagcaatgctcacaccaaataagtaacatttgtctactgaagcacacccaaacagggacaccaaccagaataacgaagctcgataaagtggtgtctggattttcactgaaatcctgtgcactttctaatctggcttgtattagggacattttccctaatacggtgtttgcagacagcaacatcgacagtgtcatggctcccgatgcttttgtctgtggccgaatctgcactcatcatcccggttgcttgttttttaccttcttttcccaggaatggcccaaagaatctcaaagaaatctttgtctccttaaaacatctgagagtggattgcccagtacacgcattaaaaagagcaaagctctttctggtttcagtctacaaagctgcaggcacagcatcccagtgttctgccattcttcattttaccatgacactgatttcttgggagaagaactggatattgttgctgcaaaaagtcacgaggcctgccagaaactgtgcaccaatgccgtccgctgccagttttttacctataccccagcccaagcatcctgcaacgaagggaagggcaagtgttacttaaagctttcttcaaacggatctccaactaaaatacttcacgggagaggaggcatctctggatacacattaaggttgtgtaaaatggataatgagtgtaccaccaaaatcaagcccaggatcgttggaggaactgcgtctgttcgtggtgagtggccgtggcaggtgaccctgcacacaacctcacccactcagagacacctgtgtggaggctccatcattggaaaccagtggatattaacagccgctcactgtttctatggggtagagtcacctaagattttgcgtgtctacagtggcattttaaatcaatctgaaataaaagaggacacatctttctttggggttcaagaaataataatccatgatcagtataaaatggcagaaagcgggtatgatattgccttgttgaaactggaaaccacagtgaattacacagattctcaacgacccatatgcctgccttccaaaggagatagaaatgtaatatacactgattgctgggtgactggatgggggtacagaaaactaagagacaaaatacaaaatactctccagaaagccaagatacccttagtgaccaacgaagagtgccagaagagatacagaggacataaaataacccataagatgatctgtgccggctacagggaaggagggaaggacgcttgcaagggagattcgggaggccctctgtcctgcaaacacaatgaggtctggcatctggtaggcatcacgagctggggcgaaggctgtgctcaaagggagcggccaggtgtttacaccaacgtggtcgagtacgtggactggattctggagaaaactcaagcagtgtgaatgggttcccaggggccattggagtccctgaaggacccaggatttgctgggagagggtgttgagttcactgtgccagcatgcttcctccacagtaacacgctgaaggggcttggtgtttgtaagaaaatgctagaagaaaacaaactgtcacaagttgttatgtcc

SEQ ID NO: 196 - protein, 571 aa, Homo sapiens
MIFLYQVVHFILFTSVSGECVTQLLKDTCFEGGDITTVFTPSAKYCQVVCTYHPRCLLFTFTAESPSEDPTRWFTCVLKDSVTETLPRVNRTAAISGYSFKQCSHQISNICLLKHTQTGTPTRITKLDKVVSGFSLKSCALSNLACIRDIFPNTVFADSNIDSVMAPDAFVCGRICTHHPGCLFFTFFSQEWPKESQRNLCLLKTSESGLPSTRIKKSKALSGFSLQSCRHSIPVFCHSSFYHDTDFLGEELDIVAAKSHEACQKLCTNAVRCQFFTYTPAQASCNEGKGKCYLKLSSNGSPTKILHGRGGISGYTLRLCKMDNECTTKIKPRIVGGTASVRGEWPWQVTLHTTSPTQRHLCGGSIIGNQWILTAAHCFYGVESPKILRVYSGILNQSEIKEDTSFFGVQEIIIHDQYKMAESGYDIALLKLETTVNYTDSQRPICLPSKGDRNVIYTDCWVTGWGYRKLRDKIQNTLQKAKIPLVTNEECQKRYRGHKITHKMICAGYREGGKDACKGDSGGPLSCKHNEVWHLVGITSWGEGCAQRERPGVYTNVVEYVDWILEKTQAV

SEQ ID NO: 197 - DNA, 2804 bp, Homo sapiens
accactttcacaatctgctagcaaaggttatgcagcgcgtgaacatgatcatggcagaatcaccaggcctcatcaccatctgccttttaggatatctactcagtgctgaatgtacagtttttcttgatcatgaaaacgccaacaaaattctgaatcggccaaagaggtataattcaggtaaattggaagagtttgttcaagggaaccttgagagagaatgtatggaagaaaagtgtagttttgaagaagcacgagaagtttttgaaaacactgaaagaacaactgaattttggaagcagtatgttgatggagatcagtgtgagtccaatccatgtttaaatggcggcagttgcaaggatgacattaattcctatgaatgttggtgtccctttggatttgaaggaaagaactgtgaattagatgtaacatgtaacattaagaatggcagatgcgagcagttttgtaaaaatagtgctgataacaaggtggtttgctcctgtactgagggatatcgacttgcagaaaaccagaagtcctgtgaaccagcagtgccatttccatgtggaagagtttctgtttcacaaacttctaagctcacccgtgctgagactgtttttcctgatgtggactatgtaaattctactgaagctgaaaccattttggataacatcactcaaagcacccaatcatttaatgacttcactcgggttgttggtggagaagatgccaaaccaggtcaattcccttggcaggttgttttgaatggtaaagttgatgcattctgtggaggctctatcgttaatgaaaaatggattgtaactgctgcccactgtgttgaaactggtgttaaaattacagttgtcgcaggtgaacataatattgaggagacagaacatacagagcaaaagcgaaatgtgattcgaattattcctcaccacaactacaatgcagctattaataagtacaaccatgacattgcccttctggaactggacgaacccttagtgctaaacagctacgttacacctatttgcattgctgacaaggaatacacgaacatcttcctcaaatttggatctggctatgtaagtggctggggaagagtcttccacaaagggagatcagctttagttcttcagtaccttagagttccacttgttgaccgagccacatgtcttcgatctacaaagttcaccatctataacaacatgttctgtgctggcttccatgaaggaggtagagattcatgtcaaggagatagtgggggaccccatgttactgaagtggaagggaccagtttcttaactggaattattagctggggtgaagagtgtgcaatgaaaggcaaatatggaatatataccaaggtatcccggtatgtcaactggattaaggaaaaaacaaagctcacttaatgaaagatggatttccaaggttaattcattggaattgaaaattaacagggcctctcactaactaatcactttcccatcttttgttagatttgaatatatacattctatgatcattgctttttctctttacaggggagaatttcatattttacctgagcaaattgattagaaaatggaaccactagaggaatataatgtgttaggaaattacagtcatttctaagggcccagcccttgacaaaattgtgaagttaaattctccactctgtccatcagatactatggttctccactatggcaactaactcactcaattttccctccttagcagcattccatcttcccgatcttctttgcttctccaaccaaaacatcaatgtttattagttctgtatacagtacaggatctttggtctactctatcacaaggccagtaccacactcatgaagaaagaacacaggagtagctgagaggctaaaactcatcaaaaacactactccttttcctctaccctattcctcaatcttttaccttttccaaatcccaatccccaaatcagtttttctctttcttactccctctctcccttttaccctccatggtcgttaaaggagagatggggagcatcattctgttatacttctgtacacagttatacatgtctatcaaacccagacttgcttccatagtggagacttgcttttcagaacatagggatgaagtaaggtgcctgaaaagtttgggggaaaagtttctttcagagagttaagttattttatatatataatatatatataaaatatataatatacaatataaatatatagtgtgtgtgtgtatgcgtgtgtgtagacacacacgcatacacacatataatggaagcaataagccattctaagagcttgtatggttatggaggtctgactaggcatgatttcacgaaggcaagattggcatatcattgtaactaaaaaagctgacattgacccagacatattgtactctttctaaaaataataataataatgctaacagaaagaagagaaccgttcgtttgcaatctacagctagtagagactttgaggaagaattcaacagtgtgtcttcagcagtgttcagagccaagcaagaagttgaagttgcctagaccagaggacataagtatcatgtctcctttaactagcataccccgaagtggagaagggtgcagcaggctcaaaggcataagtcattccaatcagccaactaagttgtccttttctggtttcgtgttcaccatggaacattttgattatagttaatccttctatcttgaatcttctagagagttgctgaccaactgacgtatgtttccctttgtgaattaataaactggtgttctggttcat

SEQ ID NO: 198 - protein, 461 aa, Homo sapiens
MQRVNMIMAESPGLITICLLGYLLSAECTVFLDHENANKILNRPKRYNSGKLEEFVQGNLERECMEEKCSFEEAREVFENTERTTEFWKQYVDGDQCESNPCLNGGSCKDDINSYECWCPFGFEGKNCELDVTCNIKNGRCEQFCKNSADNKVVCSCTEGYRLAENQKSCEPAVPFPCGRVSVSQTSKLTRAETVFPDVDYVNSTEAETILDNITQSTQSFNDFTRVVGGEDAKPGQFPWQVVLNGKVDAFCGGSIVNEKWIVTAAHCVETGVKITVVAGEHNIEETEHTEQKRNVIRIIPHHNYNAAINKYNHDIALLELDEPLVLNSYVTPICIADKEYTNIFLKFGSGYVSGWGRVFHKGRSALVLQYLRVPLVDRATCLRSTKFTIYNNMFCAGFHEGGRDSCQGDSGGPHVTEVEGTSFLTGIISWGEECAMKGKYGIYTKVSRYVNWIKEKTKLT

SEQ ID NO: 199 - DNA, 2478 bp, Homo sapiens
agtcccatggggaatgtcaacaggcaggggcagcactgcagagatttcatcatggtctcccaggccctcaggctcctctgccttctgcttgggcttcagggctgcctggctgcaggcggggtcgctaaggcctcaggaggagaaacacgggacatgccgtggaagccggggcctcacagagtcttcgtaacccaggaggaagcccacggcgtcctgcaccggcgccggcgcgccaacgcgttcctggaggagctgcggccgggctccctggagagggagtgcaaggaggagcagtgctccttcgaggaggcccgggagatcttcaaggacgcggagaggacgaagctgttctggatttcttacagtgatggggaccagtgtgcctcaagtccatgccagaatgggggctcctgcaaggaccagctccagtcctatatctgcttctgcctccctgccttcgagggccggaactgtgagacgcacaaggatgaccagctgatctgtgtgaacgagaacggcggctgtgagcagtactgcagtgaccacacgggcaccaagcgctcctgtcggtgccacgaggggtactctctgctggcagacggggtgtcctgcacacccacagttgaatatccatgtggaaaaatacctattctagaaaaaagaaatgccagcaaaccccaaggccgaattgtggggggcaaggtgtgccccaaaggggagtgtccatggcaggtcctgttgttggtgaatggagctcagttgtgtggggggaccctgatcaacaccatctgggtggtctccgcggcccactgtttcgacaaaatcaagaactggaggaacctgatcgcggtgctgggcgagcacgacctcagcgagcacgacggggatgagcagagccggcgggtggcgcaggtcatcatccccagcacgtacgtcccgggcaccaccaaccacgacatcgcgctgctccgcctgcaccagcccgtggtcctcactgaccatgtggtgcccctctgcctgcccgaacggacgttctctgagaggacgctggccttcgtgcgcttctcattggtcagcggctggggccagctgctggaccgtggcgccacggccctggagctcatggtgctcaacgtgccccggctgatgacccaggactgcctgcagcagtcacggaaggtgggagactccccaaatatcacggagtacatgttctgtgccggctactcggatggcagcaaggactcctgcaagggggacagtggaggcccacatgccacccactaccggggcacgtggtacctgacgggcatcgtcagctggggccagggctgcgcaaccgtgggccactttggggtgtacaccagggtctcccagtacatcgagtggctgcaaaagctcatgcgctcagagccacgcccaggagtcctcctgcgagccccatttccctagcccagcagccctggcctgtggagagaaagccaaggctgcgtcgaactgtcctggcaccaaatcccatatattcttctgcagttaatggggtagaggagggcatgggagggagggagaggtggggagggagacagagacagaaacagagagagacagagacagagagagactgagggagagactctgaggacatggagagagactcaaagagactccaagattcaaagagactaatagagacacagagatggaatagaaaagatgagaggcagaggcagacaggcgctggacagaggggcaggggagtgccaaggttgtcctggaggcagacagcccagctgagcctccttacctcccttcagccaagccccacctgcacgtgatctgctggccctcaggctgctgctctgccttcattgctggagacagtagaggcatgaacacacatggatgcacacacacacacgccaatgcacacacacagagatatgcacacacacggatgcacacacagatggtcacacagagatacgcaaacacaccgatgcacacgcacatagagatatgcacacacagatgcacacacagatatacacatggatgcacgcacatgccaatgcacgcacacatcagtgcacacggatgcacagagatatgcacacaccgatgtgcgcacacacagatatgcacacacatggatgagcacacacacaccaagtgcgcacacacaccgatgtacacacacagatgcacacacagatgcacacacaccgatgctgactccatgtgtgctgtcctctgaaggcggttgtttagctctcacttttctggttcttatccattatcatcttcacttcagacaattcagaagcatcaccatgcatggtggcgaatgcccccaaactctcccccaaatgtatttctcccttcgctgggtgccgggctgcacagactattccccacctgcttcccagcttcacaataaacggctgcgtctcctccgcacacctgtggtgcctgccaccc

SEQ ID NO: 200 - protein, 466 aa, Homo sapiens
MVSQALRLLCLLLGLQGCLAAGGVAKASGGETRDMPWKPGPHRVFVTQEEAHGVLHRRRRANAFLEELRPGSLERECKEEQCSFEEAREIFKDAERTKLFWISYSDGDQCASSPCQNGGSCKDQLQSYICFCLPAFEGRNCETHKDDQLICVNENGGCEQYCSDHTGTKRSCRCHEGYSLLADGVSCTPTVEYPCGKIPILEKRNASKPQGRIVGGKVCPKGECPWQVLLLVNGAQLCGGTLINTIWVVSAAHCFDKIKNWRNLIAVLGEHDLSEHDGDEQSRRVAQVIIPSTYVPGTTNHDIALLRLHQPVVLTDHVVPLCLPERTFSERTLAFVRFSLVSGWGQLLDRGATALELMVLNVPRLMTQDCLQQSRKVGDSPNITEYMFCAGYSDGSKDSCKGDSGGPHATHYRGTWYLTGIVSWGQGCATVGHFGVYTRVSQYIEWLQKLMRSEPRPGVLLRAPFP

SEQ ID NO: 201 - DNA, 2412 bp, Homo sapiens
agtcccatggggaatgtcaacaggcaggggcagcactgcagagatttcatcatggtctcccaggccctcaggctcctctgccttctgcttgggcttcagggctgcctggctgcagtcttcgtaacccaggaggaagcccacggcgtcctgcaccggcgccggcgcgccaacgcgttcctggaggagctgcggccgggctccctggagagggagtgcaaggaggagcagtgctccttcgaggaggcccgggagatcttcaaggacgcggagaggacgaagctgttctggatttcttacagtgatggggaccagtgtgcctcaagtccatgccagaatgggggctcctgcaaggaccagctccagtcctatatctgcttctgcctccctgccttcgagggccggaactgtgagacgcacaaggatgaccagctgatctgtgtgaacgagaacggcggctgtgagcagtactgcagtgaccacacgggcaccaagcgctcctgtcggtgccacgaggggtactctctgctggcagacggggtgtcctgcacacccacagttgaatatccatgtggaaaaatacctattctagaaaaaagaaatgccagcaaaccccaaggccgaattgtggggggcaaggtgtgccccaaaggggagtgtccatggcaggtcctgttgttggtgaatggagctcagttgtgtggggggaccctgatcaacaccatctgggtggtctccgcggcccactgtttcgacaaaatcaagaactggaggaacctgatcgcggtgctgggcgagcacgacctcagcgagcacgacggggatgagcagagccggcgggtggcgcaggtcatcatccccagcacgtacgtcccgggcaccaccaaccacgacatcgcgctgctccgcctgcaccagcccgtggtcctcactgaccatgtggtgcccctctgcctgcccgaacggacgttctctgagaggacgctggccttcgtgcgcttctcattggtcagcggctggggccagctgctggaccgtggcgccacggccctggagctcatggtgctcaacgtgccccggctgatgacccaggactgcctgcagcagtcacggaaggtgggagactccccaaatatcacggagtacatgttctgtgccggctactcggatggcagcaaggactcctgcaagggggacagtggaggcccacatgccacccactaccggggcacgtggtacctgacgggcatcgtcagctggggccagggctgcgcaaccgtgggccactttggggtgtacaccagggtctcccagtacatcgagtggctgcaaaagctcatgcgctcagagccacgcccaggagtcctcctgcgagccccatttccctagcccagcagccctggcctgtggagagaaagccaaggctgcgtcgaactgtcctggcaccaaatcccatatattcttctgcagttaatggggtagaggagggcatgggagggagggagaggtggggagggagacagagacagaaacagagagagacagagacagagagagactgagggagagactctgaggacatggagagagactcaaagagactccaagattcaaagagactaatagagacacagagatggaatagaaaagatgagaggcagaggcagacaggcgctggacagaggggcaggggagtgccaaggttgtcctggaggcagacagcccagctgagcctccttacctcccttcagccaagccccacctgcacgtgatctgctggccctcaggctgctgctctgccttcattgctggagacagtagaggcatgaacacacatggatgcacacacacacacgccaatgcacacacacagagatatgcacacacacggatgcacacacagatggtcacacagagatacgcaaacacaccgatgcacacgcacatagagatatgcacacacagatgcacacacagatatacacatggatgcacgcacatgccaatgcacgcacacatcagtgcacacggatgcacagagatatgcacacaccgatgtgcgcacacacagatatgcacacacatggatgagcacacacacaccaagtgcgcacacacaccgatgtacacacacagatgcacacacagatgcacacacaccgatgctgactccatgtgtgctgtcctctgaaggcggttgtttagctctcacttttctggttcttatccattatcatcttcacttcagacaattcagaagcatcaccatgcatggtggcgaatgcccccaaactctcccccaaatgtatttctcccttcgctgggtgccgggctgcacagactattccccacctgcttcccagcttcacaataaacggctgcgtctcctccgcacacctgtggtgcctgccaccc

SEQ ID NO: 202 - protein, 444 aa, Homo sapiens
MVSQALRLLCLLLGLQGCLAAVFVTQEEAHGVLHRRRRANAFLEELRPGSLERECKEEQCSFEEAREIFKDAERTKLFWISYSDGDQCASSPCQNGGSCKDQLQSYICFCLPAFEGRNCETHKDDQLICVNENGGCEQYCSDHTGTKRSCRCHEGYSLLADGVSCTPTVEYPCGKIPILEKRNASKPQGRIVGGKVCPKGECPWQVLLLVNGAQLCGGTLINTIWVVSAAHCFDKIKNWRNLIAVLGEHDLSEHDGDEQSRRVAQVIIPSTYVPGTTNHDIALLRLHQPVVLTDHVVPLCLPERTFSERTLAFVRFSLVSGWGQLLDRGATALELMVLNVPRLMTQDCLQQSRKVGDSPNITEYMFCAGYSDGSKDSCKGDSGGPHATHYRGTWYLTGIVSWGQGCATVGHFGVYTRVSQYIEWLQKLMRSEPRPGVLLRAPFP

SEQ ID NO: 203 - DNA, 1502 bp, Homo sapiens
cagggacacagtactcggccacaccatggggcgcccactgcacctcgtcctgctcagtgcctccctggctggcctcctgctgctcggggaaagtctgttcatccgcagggagcaggccaacaacatcctggcgagggtcacgagggccaattcctttcttgaagagatgaagaaaggacacctcgaaagagagtgcatggaagagacctgctcatacgaagaggcccgcgaggtctttgaggacagcgacaagacgaatgaattctggaataaatacaaagatggcgaccagtgtgagaccagtccttgccagaaccagggcaaatgtaaagacggcctcggggaatacacctgcacctgtttagaaggattcgaaggcaaaaactgtgaattattcacacggaagctctgcagcctggacaacggggactgtgaccagttctgccacgaggaacagaactctgtggtgtgctcctgcgcccgcgggtacaccctggctgacaacggcaaggcctgcattcccacagggccctacccctgtgggaaacagaccctggaacgcaggaagaggtcagtggcccaggccaccagcagcagcggggaggcccctgacagcatcacatggaagccatatgatgcagccgacctggaccccaccgagaaccccttcgacctgcttgacttcaaccagacgcagcctgagaggggcgacaacaacctcaccaggatcgtgggaggccaggaatgcaaggacggggagtgtccctggcaggccctgctcatcaatgaggaaaacgagggtttctgtggtggaaccattctgagcgagttctacatcctaacggcagcccactgtctctaccaagccaagagattcaaggtgagggtaggggaccggaacacggagcaggaggagggcggtgaggcggtgcacgaggtggaggtggtcatcaagcacaaccggttcacaaaggagacctatgacttcgacatcgccgtgctccggctcaagacccccatcaccttccgcatgaacgtggcgcctgcctgcctccccgagcgtgactgggccgagtccacgctgatgacgcagaagacggggattgtgagcggcttcgggcgcacccacgagaagggccggcagtccaccaggctcaagatgctggaggtgccctacgtggaccgcaacagctgcaagctgtccagcagcttcatcatcacccagaacatgttctgtgccggctacgacaccaagcaggaggatgcctgccagggggacagcgggggcccgcacgtcacccgcttcaaggacacctacttcgtgacaggcatcgtcagctggggagagggctgtgcccgtaaggggaagtacgggatctacaccaaggtcaccgccttcctcaagtggatcgacaggtccatgaaaaccaggggcttgcccaaggccaagagccatgccccggaggtcataacgtcctctccattaaagtgagatcccactc

SEQ ID NO: 204 - protein, 488 aa, Homo sapiens
MGRPLHLVLLSASLAGLLLLGESLFIRREQANNILARVTRANSFLEEMKKGHLERECMEETCSYEEAREVFEDSDKTNEFWNKYKDGDQCETSPCQNQGKCKDGLGEYTCTCLEGFEGKNCELFTRKLCSLDNGDCDQFCHEEQNSVVCSCARGYTLADNGKACIPTGPYPCGKQTLERRKRSVAQATSSSGEAPDSITWKPYDAADLDPTENPFDLLDFNQTQPERGDNNLTRIVGGQECKDGECPWQALLINEENEGFCGGTILSEFYILTAAHCLYQAKRFKVRVGDRNTEQEEGGEAVHEVEVVIKHNRFTKETYDFDIAVLRLKTPITFRMNVAPACLPERDWAESTLMTQKTGIVSGFGRTHEKGRQSTRLKMLEVPYVDRNSCKLSSSFIITQNMFCAGYDTKQEDACQGDSGGPHVTRFKDTYFVTGIVSWGEGCARKGKYGIYTKVTAFLKWIDRSMKTRGLPKAKSHAPEVITSSPLK

SEQ ID NO: 205 - DNA, 1997 bp, Homo sapiens
aattcctcagtgacccaggagctgacacactatggcgcacgtccgaggcttgcagctgcctggctgcctggccctggctgccctgtgtagccttgtgcacagccagcatgtgttcctggctcctcagcaagcacggtcgctgctccagcgggtccggcgagccaacaccttcttggaggaggtgcgcaagggcaacctagagcgagagtgcgtggaggagacgtgcagctacgaggaggccttcgaggctctggagtcctccacggctacggatgtgttctgggccaagtacacagcttgtgagacagcgaggacgcctcgagataagcttgctgcatgtctggaaggtaactgtgctgagggtctgggtacgaactaccgagggcatgtgaacatcacccggtcaggcattgagtgccagctatggaggagtcgctacccacataagcctgaaatcaactccactacccatcctggggccgacctacaggagaatttctgccgcaaccccgacagcagcaccacgggaccctggtgctacactacagaccccaccgtgaggaggcaggaatgcagcatccctgtctgtggccaggatcaagtcactgtagcgatgactccacgctccgaaggctccagtgtgaatctgtcacctccattggagcagtgtgtccctgatcgggggcagcagtaccaggggcgcctggcggtgaccacacatgggctcccctgcctggcctgggccagcgcacaggccaaggccctgagcaagcaccaggacttcaactcagctgtgcagctggtggagaacttctgccgcaacccagacggggatgaggagggcgtgtggtgctatgtggccgggaagcctggcgactttgggtactgcgacctcaactattgtgaggaggccgtggaggaggagacaggagatgggctggatgaggactcagacagggccatcgaagggcgtaccgccaccagtgagtaccagactttcttcaatccgaggacctttggctcgggagaggcagactgtgggctgcgacctctgttcgagaagaagtcgctggaggacaaaaccgaaagagagctcctggaatcctacatcgacgggcgcattgtggagggctcggatgcagagatcggcatgtcaccttggcaggtgatgcttttccggaagagtccccaggagctgctgtgtggggccagcctcatcagtgaccgctgggtcctcaccgccgcccactgcctcctgtacccgccctgggacaagaacttcaccgagaatgaccttctggtgcgcattggcaagcactcccgcacaaggtacgagcgaaacattgaaaagatatccatgttggaaaagatctacatccaccccaggtacaactggcgggagaacctggaccgggacattgccctgatgaagctgaagaagcctgttgccttcagtgactacattcaccctgtgtgtctgcccgacagggagacggcagccagcttgctccaggctggatacaaggggcgggtgacaggctggggcaacctgaaggagacgtggacagccaacgttggtaaggggcagcccagtgtcctgcaggtggtgaacctgcccattgtggagcggccggtctgcaaggactccacccggatccgcatcactgacaacatgttctgtgctggttacaagcctgatgaagggaaacgaggggatgcctgtgaaggtgacagtgggggaccctttgtcatgaagagcccctttaacaaccgctggtatcaaatgggcatcgtctcatggggtgaaggctgtgaccgggatgggaaatatggcttctacacacatgtgttccgcctgaagaagtggatacagaaggtcattgatcagtttggagagtaggggccactcatattctgggctcctggaaccaatcccgtgaaagaattatttttgtgtttctaaaactatggttcccaataaaagtgactctcagcgg

SEQ ID NO: 206 - protein, 622 aa, Homo sapiens
MAHVRGLQLPGCLALAALCSLVHSQHVFLAPQQARSLLQRVRRANTFLEEVRKGNLERECVEETCSYEEAFEALESSTATDVFWAKYTACETARTPRDKLAACLEGNCAEGLGTNYRGHVNITRSGIECQLWRSRYPHKPEINSTTHPGADLQENFCRNPDSSTTGPWCYTTDPTVRRQECSIPVCGQDQVTVAMTPRSEGSSVNLSPPLEQCVPDRGQQYQGRLAVTTHGLPCLAWASAQAKALSKHQDFNSAVQLVENFCRNPDGDEEGVWCYVAGKPGDFGYCDLNYCEEAVEEETGDGLDEDSDRAIEGRTATSEYQTFFNPRTFGSGEADCGLRPLFEKKSLEDKTERELLESYIDGRIVEGSDAEIGMSPWQVMLFRKSPQELLCGASLISDRWVLTAAHCLLYPPWDKNFTENDLLVRIGKHSRTRYERNIEKISMLEKIYIHPRYNWRENLDRDIALMKLKKPVAFSDYIHPVCLPDRETAASLLQAGYKGRVTGWGNLKETWTANVGKGQPSVLQVVNLPIVERPVCKDSTRIRITDNMFCAGYKPDEGKRGDACEGDSGGPFVMKSPFNNRWYQMGIVSWGEGCDRDGKYGFYTHVFRLKKWIQKVIDQFGE

SEQ ID NO: 207 - DNA, 1843 bp, Homo sapiens
ctgcaggggggggggggggggggggctgtcatggcggcaggacggcgaacttgcagtatctccacgacccgcccctacaggtgccagtgcctccagaatgtggcagctcacaagcctcctgctgttcgtggccacctggggaatttccggcacaccagctcctcttgactcagtgttctccagcagcgagcgtgcccaccaggtgctgcggatccgcaaacgtgccaactccttcctggaggagctccgtcacagcagcctggagcgggagtgcatagaggagatctgtgacttcgaggaggccaaggaaattttccaaaatgtggatgacacactggccttctggtccaagcacgtcgacggtgaccagtgcttggtcttgcccttggagcacccgtgcgccagcctgtgctgcgggcacggcacgtgcatcgacggcatcggcagcttcagctgcgactgccgcagcggctgggagggccgcttctgccagcgcgaggtgagcttcctcaattgctcgctggacaacggcggctgcacgcattactgcctagaggaggtgggctggcggcgctgtagctgtgcgcctggctacaagctgggggacgacctcctgcagtgtcaccccgcagtgaagttcccttgtgggaggccctggaagcggatggagaagaagcgcagtcacctgaaacgagacacagaagaccaagaagaccaagtagatccgcggctcattgatgggaagatgaccaggcggggagacagcccctggcaggtggtcctgctggactcaaagaagaagctggcctgcggggcagtgctcatccacccctcctgggtgctgacagcggcccactgcatggatgagtccaagaagctccttgtcaggcttggagagtatgacctgcggcgctgggagaagtgggagctggacctggacatcaaggaggtcttcgtccaccccaactacagcaagagcaccaccgacaatgacatcgcactgctgcacctggcccagcccgccaccctctcgcagaccatagtgcccatctgcctcccggacagcggccttgcagagcgcgagctcaatcaggccggccaggagaccctcgtgacgggctggggctaccacagcagccgagagaaggaggccaagagaaaccgcaccttcgtcctcaacttcatcaagattcccgtggtcccgcacaatgagtgcagcgaggtcatgagcaacatggtgtctgagaacatgctgtgtgcgggcatcctcggggaccggcaggatgcctgcgagggcgacagtggggggcccatggtcgcctccttccacggcacctggttcctggtgggcctggtgagctggggtgagggctgtgggctccttcacaactacggcgtttacaccaaagtcagccgctacctcgactggatccatgggcacatcagagacaaggaagccccccagaagagctgggcaccttagcgaccctccctgcagggctgggcttttgcatggcaatggatgggacattaaagggacatgtaacaagcacaccggcctgctgttctgtccttccatccctcttttgggctcttctggagggaagtaacatttactgagcacctgttgtatgtcacatgccttatgaatagaatcttaactcctagagcaactctgtggggtggggaggagcagatccaagttttgcggggtctaaagctgtgtgtgttgagggggatactctgtttatgaaaaagaataaaaaacacaaccacgaaaaaaaaaaaaaaaaaaaaaaaaaaaaaaaaaaaaaaaacccccccccgccccccccccctgcag

SEQ ID NO: 208 - protein, 461 aa, Homo sapiens
MWQLTSLLLFVATWGISGTPAPLDSVFSSSERAHQVLRIRKRANSFLEELRHSSLERECIEEICDFEEAKEIFQNVDDTLAFWSKHVDGDQCLVLPLEHPCASLCCGHGTCIDGIGSFSCDCRSGWEGRFCQREVSFLNCSLDNGGCTHYCLEEVGWRRCSCAPGYKLGDDLLQCHPAVKFPCGRPWKRMEKKRSHLKRDTEDQEDQVDPRLIDGKMTRRGDSPWQVVLLDSKKKLACGAVLIHPSWVLTAAHCMDESKKLLVRLGEYDLRRWEKWELDLDIKEVFVHPNYSKSTTDNDIALLHLAQPATLSQTIVPICLPDSGLAERELNQAGQETLVTGWGYHSSREKEAKRNRTFVLNFIKIPVVPHNECSEVMSNMVSENMLCAGILGDRQDACEGDSGGPMVASFHGTWFLVGLVSWGEGCGLLHNYGVYTKVSRYLDWIHGHIRDKEAPQKSWAP

SEQ ID NO: 209 - DNA, 1388 bp, Homo sapiens
caggcagtgcaggagtatggttgagatgctaccaactgccattctgctggtcttggcagtgtccgtggttgctaaagataacgccacgtgtgatggcccctgtgggttacggttcaggcaaaacccacagggtggtgtccgcatcgtcggcgggaaggctgcacagcatggggcctggccctggatggtcagcctccagatcttcacgtacaacagccacaggtaccacacatgtggaggcagcttgctgaattcacgatgggtgctcactgctgctcactgcttcgtcggcaaaaataatgtgcatgactggagactggttttcggagcaaaggaaattacatatgggaacaataaaccagtaaaggcgcctgtgcaagagagatatgtggagaaaatcatcattcatgaaaaatacaactctgcgacagagggaaatgacattgccctcgtggagatcacccctcccatttcgtgtgggcgcttcattgggccgggctgcctgccccacttgaaggcaggcctccccagaggctcccagagctgctgggtggccggctggggatatatagaagagaaagcccccaggccatcatctatactgatggaggcacgtgtggatctcatcgacctggacttgtgtaactcgacccagtggtacaatgggcgcgttcagccaaccaatgtgtgcgcggggtatcctgtaggcaagatcgacacctgccagggagacagcggcgggcctctcatgtgcaaagacagcaaggaaagcgcctatgtggtcgtgggaatcacaagctggggggtaggctgtgcccgtgccaagcgccccggaatctacacggccacctggccttatctgaactggatcgcctccaagattggttctaacgctttgcgtatgattcaatcggccacccctccaccgcccaccactcgaccgcccccgattcgaccccccttctcccaccctatctctgctcaccttccttggtatttccaaccgccccctcgaccacttccaccccgaccaccggcagcccagccccgacccccaccttcacccccgcccccacccccacctccagcctcacctttacccccacccccacccccacccccacctacaccctcatctaccacaaaacttccccaaggactttcttttgccaagcgcctacagcagctcatagaggtcttgaaggggaagacctattccgacggaaagaaccattatgacatggagaccacagagctcccagaactgacctcgacctcctgatctgacctggttctcaacagacccagtgagcccttcactcctgagaaaaaggaaagatgaaataaataaataaacatatatatatagatataaaaaaaaaaaaaaa

SEQ ID NO: 210 - protein, 421 aa, Homo sapiens
MVEMLPTAILLVLAVSVVAKDNATCDGPCGLRFRQNPQGGVRIVGGKAAQHGAWPWMVSLQIFTYNSHRYHTCGGSLLNSRWVLTAAHCFVGKNNVHDWRLVFGAKEITYGNNKPVKAPVQERYVEKIIIHEKYNSATEGNDIALVEITPPISCGRFIGPGCLPHLKAGLPRGSQSCWVAGWGYIEEKAPRPSSILMEARVDLIDLDLCNSTQWYNGRVQPTNVCAGYPVGKIDTCQGDSGGPLMCKDSKESAYVVVGITSWGVGCARAKRPGIYTATWPYLNWIASKIGSNALRMIQSATPPPPTTRPPPIRPPFSHPISAHLPWYFQPPPRPLPPRPPAAQPRPPPSPPPPPPPPASPLPPPPPPPPPTPSSTTKLPQGLSFAKRLQQLIEVLKGKTYSDGKNHYDMETTELPELTSTS

SEQ ID NO: 211 - DNA, 2363 bp, Homo sapiens
tcgagcccgctttccagggaccctacctgagggcccacaggtgaggcagcctggcctagcaggccccacgccaccgcctctgcctccaggccgcccgctgctgcggggccaccatgctcctgcccaggcctggagactgacccgaccccggcactacctcgaggctccgcccccacctgctggaccccagggtaaggacaagggcccccagactcacagttccagccctgaggacaggggttccctcatccccccacccagcctaatgcccacctcctaatagaggggttcctggggacctgaagagggggcactatgacgtctccccaagcacctaggtgttctgtcctgctcttccttcagactcagccgttggaccccagtcctttcctccccagacccaggagttccagccctcaggcccctcctccctcatactagggagtcctggcccccaaattcctcctttcccaagacttatgatttcaggtcctcagctgtctcctccctcaaaccgggatcctcagtcccctgctccaccaggctcaggcatgggggtccccatccctgcaaatccaggcgtccccccgctgctggtcagacactgaccccatccttgaacccagcccaatctgcgtccgtgatcacggcgtgctctggccaaggcccagtccctacagcctgcctggatggacgcctgggactgggggcgccaggactgggctgggctgggctcccccaggccctgcctccccgtccatctcctcacaggtcccaccctggcccaggaggtcagccagggaatcattaacaagaggcagtgacatggcgcagaaggagggtggccggactgtgccatgctgctccagacccaaggtggcagctctcactgcggggaccctgctacttctgacagccatcggggcggcatcctgggccattgtggctgttctcctcaggagtgaccaggagccgctgtacccagtgcaggtcagctctgcggacgctcggctcatggtctttgacaagacggaagggacgtggcggctgctgtgctcctcgcgctccaacgccagggtagccggactcagctgcgaggagatgggcttcctcagggcactgacccactccgagctggacgtgcgaacggcgggcgccaatggcacgtcgggcttcttctgtgtggacgaggggaggctgccccacacccagaggctgctggaggtcatctccgtgtgtgattgccccagaggccgtttcttggccgccatctgccaagactgtggccgcaggaagctgcccgtggaccgcatcgtgggaggccgggacaccagcttgggccggtggccgtggcaagtcagccttcgctatgatggagcacacctctgtgggggatccctgctctccggggactgggtgctgacagccgcccactgcttcccggagcggaaccgggtcctgtcccgatggcgagtgtttgccggtgccgtggcccaggcctctccccacggtctgcagctgggggtgcaggctgtggtctaccacgggggctatcttccctttcgggaccccaacagcgaggagaacagcaacgatattgccctggtccacctctccagtcccctgcccctcacagaatacatccagcctgtgtgcctcccagctgccggccaggccctggtggatggcaagatctgtaccgtgacgggctggggcaacacgcagtactatggccaacaggccggggtactccaggaggctcgagtccccataatcagcaatgatgtctgcaatggcgctgacttctatggaaaccagatcaagcccaagatgttctgtgctggctaccccgagggtggcattgatgcctgccagggcgacagcggtggtccctttgtgtgtgaggacagcatctctcggacgccacgttggcggctgtgtggcattgtgagttggggcactggctgtgccctggcccagaagccaggcgtctacaccaaagtcagtgacttccgggagtggatcttccaggccataaagactcactccgaagccagcggcatggtgacccagctctgaccggtggcttctcgctgcgcagcctccagggcccgaggtgatcccggtggtgggatccacgctgggccgaggatgggacgtttttcttcttgggcccggtccacaggtccaaggacaccctccctccagggtcctctcttccacagtggcgggcccactcagccccgagaccacccaacctcaccctcctgacccccatgtaaatattgttctgctgtctgggactcctgtctaggtgcccctgatgatgggatgctctttaaataataaagatggttttgatt

SEQ ID NO: 212 - protein, 417 aa, Homo sapiens
MAQKEGGRTVPCCSRPKVAALTAGTLLLLTAIGAASWAIVAVLLRSDQEPLYPVQVSSADARLMVFDKTEGTWRLLCSSRSNARVAGLSCEEMGFLRALTHSELDVRTAGANGTSGFFCVDEGRLPHTQRLLEVISVCDCPRGRFLAAICQDCGRRKLPVDRIVGGRDTSLGRWPWQVSLRYDGAHLCGGSLLSGDWVLTAAHCFPERNRVLSRWRVFAGAVAQASPHGLQLGVQAVVYHGGYLPFRDPNSEENSNDIALVHLSSPLPLTEYIQPVCLPAAGQALVDGKICTVTGWGNTQYYGQQAGVLQEARVPIISNDVCNGADFYGNQIKPKMFCAGYPEGGIDACQGDSGGPFVCEDSISRTPRWRLCGIVSWGTGCALAQKPGVYTKVSDFREWIFQAIKTHSEASGMVTQL

SEQ ID NO: 213 - DNA, 1783 bp, Homo sapiens
tcgagcccgctttccagggaccctacctgagggcccacaggtgaggcagcctggcctagcaggccccacgccaccgcctctgcctccaggccgcccgctgctgcggggccaccatgctcctgcccaggcctggagactgacccgaccccggcactacctcgaggctccgcccccacctgctggaccccagggtcccaccctggcccaggaggtcagccagggaatcattaacaagaggcagtgacatggcgcagaaggagggtggccggactgtgccatgctgctccagacccaaggtggcagctctcactgcggggaccctgctacttctgacagccatcggggcggcatcctgggccattgtggctgttctcctcaggagtgaccaggagccgctgtacccagtgcaggtcagctctgcggacgctcggctcatggtctttgacaagacggaagggacgtggcggctgctgtgctcctcgcgctccaacgccagggtagccggactcagctgcgaggagatgggcttcctcagggcactgacccactccgagctggacgtgcgaacggcgggcgccaatggcacgtcgggcttcttctgtgtggacgaggggaggctgccccacacccagaggctgctggaggtcatctccgtgtgtgattgccccagaggccgtttcttggccgccatctgccaagactgtggccgcaggaagctgcccgtggaccgcatcgtgggaggccgggacaccagcttgggccggtggccgtggcaagtcagccttcgctatgatggagcacacctctgtgggggatccctgctctccggggactgggtgctgacagccgcccactgcttcccggagcggaaccgggtcctgtcccgatggcgagtgtttgccggtgccgtggcccaggcctctccccacggtctgcagctgggggtgcaggctgtggtctaccacgggggctatcttccctttcgggaccccaacagcgaggagaacagcaacgatattgccctggtccacctctccagtcccctgcccctcacagaatacatccagcctgtgtgcctcccagctgccggccaggccctggtggatggcaagatctgtaccgtgacgggctggggcaacacgcagtactatggccaacaggccggggtactccaggaggctcgagtccccataatcagcaatgatgtctgcaatggcgctgacttctatggaaaccagatcaagcccaagatgttctgtgctggctaccccgagggtggcattgatgcctgccagggcgacagcggtggtccctttgtgtgtgaggacagcatctctcggacgccacgttggcggctgtgtggcattgtgagttggggcactggctgtgccctggcccagaagccaggcgtctacaccaaagtcagtgacttccgggagtggatcttccaggccataaagactcactccgaagccagcggcatggtgacccagctctgaccggtggcttctcgctgcgcagcctccagggcccgaggtgatcccggtggtgggatccacgctgggccgaggatgggacgtttttcttcttgggcccggtccacaggtccaaggacaccctccctccagggtcctctcttccacagtggcgggcccactcagccccgagaccacccaacctcaccctcctgacccccatgtaaatattgttctgctgtctgggactcctgtctaggtgcccctgatgatgggatgctctttaaataataaagatggttttgatt

SEQ ID NO: 214 - protein, 417 aa, Homo sapiens; identical to SEQ ID NO: 212

SEQ ID NO: 215 - DNA, 2038 bp, Homo sapiens
gccatggggcgctgggcctgggtccccagcccctggcccccaccggggctgggccccttcctcctcctcctcctgctgctgctgctgctgccacgggggttccagccccagcctggcgggaaccgtacggagtccccagaacctaatgccacagcgacccctgcgatccccactatcctggtgacctctgtgacctctgagaccccagcaacaagtgctccagaggcagagggaccccaaagtggggggctcccgcccccgcccagggcagttccctcgagcagtagcccccaggcccaagcactcaccgaggacgggaggccctgcaggttccccttccgctacgggggccgcatgctgcatgcctgcacttcggagggcagtgcacacaggaagtggtgtgccacaactcacaactacgaccgggacagggcctggggctactgtgtggaggccaccccgcctccagggggcccagctgccctggatccctgtgcctccggcccctgcctcaatggaggctcctgctccaatacccaggacccccagtcctatcactgcagctgcccccgggccttcaccggcaaggactgcggcacagagaaatgctttgatgagacccgctacgagtacctggaggggggcgaccgctgggcccgcgtgcgccagggccacgtggaacagtgcgagtgcttcgggggccggacctggtgcgaaggcacccgacatacagcttgtctgagcagcccttgcctgaacgggggcacctgccacctgatcgtggccaccgggaccaccgtgtgtgcctgcccaccaggcttcgctggacggctctgcaacatcgagcctgatgagcgctgcttcttggggaacggcactgggtaccgtggcgtggccagcacctcagcctcgggcctcagctgcctggcctggaactccgatctgctctaccaggagctgcacgtggactccgtgggcgccgcggccctgctgggcctgggcccccatgcctactgccggaatccggacaatgacgagaggccctggtgctacgtggtgaaggacagcgcgctctcctgggagtactgccgcctggaggcctgcgaatccctcaccagagtccaactgtcaccggatctcctggcgaccctgcctgagccagcctccccggggcgccaggcctgcggcaggaggcacaagaagaggacgttcctgcggccacgtatcatcggcggctcctcctcgctgcccggctcgcacccctggctggccgccatctacatcggggacagcttctgcgccgggagcctggtccacacctgctgggtggtgtcggccgcccactgcttctcccacagcccccccagggacagcgtctccgtggtgctgggccagcacttcttcaaccgcacgacggacgtgacgcagaccttcggcatcgagaagtacatcccgtacaccctgtactcggtgttcaaccccagcgaccacgacctcgtcctgatccggctgaagaagaaaggggaccgctgtgccacacgctcgcagttcgtgcagcccatctgcctgcccgagcccggcagcaccttccccgcaggacacaagtgccagattgcgggctggggccacttggatgagaacgtgagcggctactccagctccctgcgggaggccctggtccccctggtcgccgaccacaagtgcagcagccctgaggtctacggcgccgacatcagccccaacatgctctgtgccggctacttcgactgcaagtccgacgcctgccagggggactcaggggggcccctggcctgcgagaagaacggcgtggcttacctctacggcatcatcagctggggtgacggctgcgggcggctccacaagccgggggtctacacccgcgtggccaactatgtggactggatcaacgaccggatacggcctcccaggcggcttgtggctccctcctgaccctccagcgggacaccctggttcccaccattccctgccttgctgacaataaagatatttccaagaa

SEQ ID NO: 216 - protein, 655 aa, Homo sapiens
MGRWAWVPSPWPPPGLGPFLLLLLLLLLLPRGFQPQPGGNRTESPEPNATATPAIPTILVTSVTSETPATSAPEAEGPQSGGLPPPPRAVPSSSSPQAQALTEDGRPCRFPFRYGGRMLHACTSEGSAHRKWCATTHNYDRDRAWGYCVEATPPPGGPAALDPCASGPCLNGGSCSNTQDPQSYHCSCPRAFTGKDCGTEKCFDETRYEYLEGGDRWARVRQGHVEQCECFGGRTWCEGTRHTACLSSPCLNGGTCHLIVATGTTVCACPPGFAGRLCNIEPDERCFLGNGTGYRGVASTSASGLSCLAWNSDLLYQELHVDSVGAAALLGLGPHAYCRNPDNDERPWCYVVKDSALSWEYCRLEACESLTRVQLSPDLLATLPEPASPGRQACGRRHKKRTFLRPRIIGGSSSLPGSHPWLAAIYIGDSFCAGSLVHTCWVVSAAHCFSHSPPRDSVSVVLGQHFFNRTTDVTQTFGIEKYIPYTLYSVFNPSDHDLVLIRLKKKGDRCATRSQFVQPICLPEPGSTFPAGHKCQIAGWGHLDENVSGYSSSLREALVPLVADHKCSSPEVYGADISPNMLCAGYFDCKSDACQGDSGGPLACEKNGVAYLYGIISWGDGCGRLHKPGVYTRVANYVDWINDRIRPPRRLVAPS

SEQ ID NO: 217 - DNA, 2360 bp, Homo sapiens
acagtgcggagaccgcagccccggagcccgggccagggtccacctgtccccgcagcgccggctcgcgccctcctgccgcagccaccgagccgccgtctagcgccccgacctcgccaccatgagagccctgctggcgcgcctgcttctctgcgtcctggtcgtgagcgactccaaaggcagcaatgaacttcatcaagttccatcgaactgtgactgtctaaatggaggaacatgtgtgtccaacaagtacttctccaacattcactggtgcaactgcccaaagaaattcggagggcagcactgtgaaatagataagtcaaaaacctgctatgaggggaatggtcacttttaccgaggaaaggccagcactgacaccatgggccggccctgcctgccctggaactctgccactgtccttcagcaaacgtaccatgcccacagatctgatgctcttcagctgggcctggggaaacataattactgcaggaacccagacaaccggaggcgaccctggtgctatgtgcaggtgggcctaaagccgcttgtccaagagtgcatggtgcatgactgcgcagatggaaaaaagccctcctctcctccagaagaattaaaatttcagtgtggccaaaagactctgaggccccgctttaagattattgggggagaattcaccaccatcgagaaccagccctggtttgcggccatctacaggaggcaccgggggggctctgtcacctacgtgtgtggaggcagcctcatcagcccttgctgggtgatcagcgccacacactgcttcattgattacccaaagaaggaggactacatcgtctacctgggtcgctcaaggcttaactccaacacgcaaggggagatgaagtttgaggtggaaaacctcatcctacacaaggactacagcgctgacacgcttgctcaccacaacgacattgccttgctgaagatccgttccaaggagggcaggtgtgcgcagccatcccggactatacagaccatctgcctgccctcgatgtataacgatccccagtttggcacaagctgtgagatcactggctttggaaaagagaattctaccgactatctctatccggagcagctgaaaatgactgttgtgaagctgatttcccaccgggagtgtcagcagccccactactacggctctgaagtcaccaccaaaatgctgtgtgctgctgacccacagtggaaaacagattcctgccagggagactcagggggacccctcgtctgttccctccaaggccgcatgactttgactggaattgtgagctggggccgtggatgtgccctgaaggacaagccaggcgtctacacgagagtctcacacttcttaccctggatccgcagtcacaccaaggaagagaatggcctggccctctgagggtccccagggaggaaacgggcaccacccgctttcttgctggttgtcatttttgcagtagagtcatctccatcagctgtaagaagagactgggaagataggctctgcacagatggatttgcctgtgccacccaccagggcgaacgacaatagctttaccctcaggcataggcctgggtgctggctgcccagacccctctggccaggatggaggggtggtcctgactcaacatgttactgaccagcaacttgtctttttctggactgaagcctgcaggagttaaaaagggcagggcatctcctgtgcatgggtgaagggagagccagctcccccgacggtgggcatttgtgaggcccatggttgagaaatgaataatttcccaattaggaagtgtaacagctgaggtctcttgagggagcttagccaatgtgggagcagcggtttggggagcagagacactaacgacttcagggcagggctctgatattccatgaatgtatcaggaaatatatatgtgtgtgtatgtttgcacacttgtgtgtgggctgtgagtgtaagtgtgagtaagagctggtgtctgattgttaagtctaaatatttccttaaactgtgtggactgtgatgccacacagagtggtctttctggagaggttataggtcactcctggggcctcttgggtcccccacgtgacagtgcctgggaatgtattattctgcagcatgacctgtgaccagcactgtctcagtttcactttcacatagatgtccctttcttggccagttatcccttccttttagcctagttcatccaatcctcactgggtggggtgaggaccactcctgtacactgaatatttatatttcactatttttatttatatttttgtaattttaaataaaagtgatcaataaaatgtgatttttctgatgaaaaaaaaaaaaaaa

SEQ ID NO: 218 - protein, 431 aa, Homo sapiens
MRALLARLLLCVLVVSDSKGSNELHQVPSNCDCLNGGTCVSNKYFSNIHWCNCPKKFGGQHCEIDKSKTCYEGNGHFYRGKASTDTMGRPCLPWNSATVLQQTYHAHRSDALQLGLGKHNYCRNPDNRRRPWCYVQVGLKPLVQECMVHDCADGKKPSSPPEELKFQCGQKTLRPRFKIIGGEFTTIENQPWFAAIYRRHRGGSVTYVCGGSLISPCWVISATHCFIDYPKKEDYIVYLGRSRLNSNTQGEMKFEVENLILHKDYSADTLAHHNDIALLKIRSKEGRCAQPSRTIQTICLPSMYNDPQFGTSCEITGFGKENSTDYLYPEQLKMTVVKLISHRECQQPHYYGSEVTTKMLCAADPQWKTDSCQGDSGGPLVCSLQGRMTLTGIVSWGRGCALKDKPGVYTRVSHFLPWIRSHTKEENGLAL

SEQ ID NO: 219 - DNA, 2653 bp, Homo sapiens
atggccctgtccactgagcatcctcccgccacacagaaacccgcccagccggggccaccgaccccaccccctgcctggaaacttaaggaggccggagctgtggggagctcagagctgagatcctacaggagtccagggctggagagaaaacctctgcgaggaaagggaaggagcaagccgtgaatttaagggacgctgtgaagcaatcatggatgcaatgaagagagggctctgctgtgtgctgctgctgtgtggagcagtcttcgtttcgcccagccaggaaatccatgcccgattcagaagaggagccagatcttaccaagtgatctgcagagatgaaaaaacgcagatgatataccagcaacatcagtcatggctgcgccctgtgctcagaagcaaccgggtggaatattgctggtgcaacagtggcagggcacagtgccactcagtgcctgtcaaaagttgcagcgagccaaggtgtttcaacgggggcacctgccagcaggccctgtacttctcagatttcgtgtgccagtgccccgaaggatttgctgggaagtgctgtgaaatagataccagggccacgtgctacgaggaccagggcatcagctacaggggcacgtggagcacagcggagagtggcgccgagtgcaccaactggaacagcagcgcgttggcccagaagccctacagcgggcggaggccagacgccatcaggctgggcctggggaaccacaactactgcagaaacccagatcgagactcaaagccctggtgctacgtctttaaggcggggaagtacagctcagagttctgcagcacccctgcctgctctgagggaaacagtgactgctactttgggaatgggtcagcctaccgtggcacgcacagcctcaccgagtcgggtgcctcctgcctcccgtggaattccatgatcctgataggcaaggtttacacagcacagaaccccagtgcccaggcactgggcctgggcaaacataattactgccggaatcctgatggggatgccaagccctggtgccacgtgctgaagaaccgcaggctgacgtgggagtactgtgatgtgccctcctgctccacctgcggcctgagacagtacagccagcctcagtttcgcatcaaaggagggctcttcgccgacatcgcctcccacccctggcaggctgccatctttgccaagcacaggaggtcgcccggagagcggttcctgtgcgggggcatactcatcagctcctgctggattctctctgccgcccactgcttccaggagaggtttccgccccaccacctgacggtgatcttgggcagaacataccgggtggtccctggcgaggaggagcagaaatttgaagtcgaaaaatacattgtccataaggaattcgatgatgacacttacgacaatgacattgcgctgctgcagctgaaatcggattcgtcccgctgtgcccaggagagcagcgtggtccgcactgtgtgccttcccccggcggacctgcagctgccggactggacggagtgtgagctctccggctacggcaagcatgaggccttgtctcctttctattcggagcggctgaaggaggctcatgtcagactgtacccatccagccgctgcacatcacaacatttacttaacagaacagtcaccgacaacatgctgtgtgctggagacactcggagcggcgggccccaggcaaacttgcacgacgcctgccagggcgattcgggaggccccctggtgtgtctgaacgatggccgcatgactttggtgggcatcatcagctggggcctgggctgtggacagaaggatgtcccgggtgtgtacaccaaggttaccaactacctagactggattcgtgacaacatgcgaccgtgaccaggaacacccgactcctcaaaagcaaatgagatcccgcctcttcttcttcagaagacactgcaaaggcgcagtgcttctctacagacttctccagacccaccacaccgcagaagcgggacgagaccctacaggagagggaagagtgcattttcccagatacttcccattttggaagttttcaggacttggtctgatttcaggatactctgtcagatgggaagacatgaatgcacactagcctctccaggaatgcctcctccctgggcagaaagtggccatgccaccctgttttcagctaaagcccaacctcctgacctgtcaccgtgagcagctttggaaacaggaccacaaaaatgaaagcatgtctcaatagtaaaagataacaagatctttcaggaaagacggattgcattagaaatagacagtatatttatagtcacaagagcccagcagggcctcaaagttggggcaggctggctggcccgtcatgttcctcaaaagcacccttgacgtcaagtctccttcccctttccccactccctggctctcagaaggtattccttttgtgtacagtgtgtaaagtgtaaatcctttttctttataaactttagagtagcatgagagaattgtatcatttgaacaactaggcttcagcatatttatagcaatccatgttagtttttactttctgttgccacaaccctgttttatactgtacttaataaattcagatatatttttcacagtttttcc

SEQ ID NO: 220 - protein, 562 aa, Homo sapiens
MDAMKRGLCCVLLLCGAVFVSPSQEIHARFRRGARSYQVICRDEKTQMIYQQHQSWLRPVLRSNRVEYCWCNSGRAQCHSVPVKSCSEPRCFNGGTCQQALYFSDFVCQCPEGFAGKCCEIDTRATCYEDQGISYRGTWSTAESGAECTNWNSSALAQKPYSGRRPDAIRLGLGNHNYCRNPDRDSKPWCYVFKAGKYSSEFCSTPACSEGNSDCYFGNGSAYRGTHSLTESGASCLPWNSMILIGKVYTAQNPSAQALGLGKHNYCRNPDGDAKPWCHVLKNRRLTWEYCDVPSCSTCGLRQYSQPQFRIKGGLFADIASHPWQAAIFAKHRRSPGERFLCGGILISSCWILSAAHCFQERFPPHHLTVILGRTYRVVPGEEEQKFEVEKYIVHKEFDDDTYDNDIALLQLKSDSSRCAQESSVVRTVCLPPADLQLPDWTECELSGYGKHEALSPFYSERLKEAHVRLYPSSRCTSQHLLNRTVTDNMLCAGDTRSGGPQANLHDACQGDSGGPLVCLNDGRMTLVGIISWGLGCGQKDVPGVYTKVTNYLDWIRDNMRP

SEQ ID NO: 221 - DNA, 2160 bp, Homo sapiens
atggccctgtccactgagcatcctcccgccacacagaaacccgcccagccggggccaccgaccccaccccctgcctggaaacttaaggaggccggagctgtggggagctcagagctgagatcctacaggagtccagggctggagagaaaacctctgcgaggaaagggaaggagcaagccgtgaatttaagggacgctgtgaagcaatcatggatgcaatgaagagagggctctgctgtgtgctgctgctgtgtggagcagtcttcgtttcgcccagccaggaaatccatgcccgattcagaagaggagccagatcttaccaagtgatctgcagagatgaaaaaacgcagatgatataccagcaacatcagtcatggctgcgccctgtgctcagaagcaaccgggtggaatattgctggtgcaacagtggcagggcacagtgccactcagtgcctgtcaaaagttgcagcgagccaaggtgtttcaacgggggcacctgccagcaggccctgtacttctcagatttcgtgtgccagtgccccgaaggatttgctgggaagtgctgtgaaatagataccagggccacgtgctacgaggaccagggcatcagctacaggggcacgtggagcacagcggagagtggcgccgagtgcaccaactggaacagcagcgcgttggcccagaagccctacagcgggcggaggccagacgccatcaggctgggcctggggaaccacaactactgcagaaacccagatcgagactcaaagccctggtgctacgtctttaaggcggggaagtacagctcagagttctgcagcacccctgcctgctctgagggaaacagtgactgctactttgggaatgggtcagcctaccgtggcacgcacagcctcaccgagtcgggtgcctcctgcctcccgtggaattccatgatcctgataggcaaggtttacacagcacagaaccccagtgcccaggcactgggcctgggcaaacataattactgccggactggacggagtgtgagctctccggctacggcaagcatgaggccttgtctcctttctattcggagcggctgaaggaggctcatgtcagactgtacccatccagccgctgcacatcacaacatttacttaacagaacagtcaccgacaacatgctgtgtgctggagacactcggagcggcgggccccaggcaaacttgcacgacgcctgccagggcgattcgggaggccccctggtgtgtctgaacgatggccgcatgactttggtgggcatcatcagctggggcctgggctgtggacagaaggatgtcccgggtgtgtacaccaaggttaccaactacctagactggattcgtgacaacatgcgaccgtgaccaggaacacccgactcctcaaaagcaaatgagatcccgcctcttcttcttcagaagacactgcaaaggcgcagtgcttctctacagacttctccagacccaccacaccgcagaagcgggacgagaccctacaggagagggaagagtgcattttcccagatacttcccattttggaagttttcaggacttggtctgatttcaggatactctgtcagatgggaagacatgaatgcacactagcctctccaggaatgcctcctccctgggcagaaagtggccatgccaccctgttttcagctaaagcccaacctcctgacctgtcaccgtgagcagctttggaaacaggaccacaaaaatgaaagcatgtctcaatagtaaaagataacaagatctttcaggaaagacggattgcattagaaatagacagtatatttatagtcacaagagcccagcagggcctcaaagttggggcaggctggctggcccgtcatgttcctcaaaagcacccttgacgtcaagtctccttcccctttccccactccctggctctcagaaggtattccttttgtgtacagtgtgtaaagtgtaaatcctttttctttataaactttagagtagcatgagagaattgtatcatttgaacaactaggcttcagcatatttatagcaatccatgttagtttttactttctgttgccacaaccctgttttatactgtacttaataaattcagatatatttttcacagtttttccaaaaaaaaaaaaaaaaaaaaa

SEQ ID NO: 222 - protein, 291 aa, Homo sapiens
MDAMKRGLCCVLLLCGAVFVSPSQEIHARFRRGARSYQVICRDEKTQMIYQQHQSWLRPVLRSNRVEYCWCNSGRAQCHSVPVKSCSEPRCFNGGTCQQALYFSDFVCQCPEGFAGKCCEIDTRATCYEDQGISYRGTWSTAESGAECTNWNSSALAQKPYSGRRPDAIRLGLGNHNYCRNPDRDSKPWCYVFKAGKYSSEFCSTPACSEGNSDCYFGNGSAYRGTHSLTESGASCLPWNSMILIGKVYTAQNPSAQALGLGKHNYCRTGRSVSSPATASMRPCLLSIRSG

SEQ ID NO: 223 - DNA, 2534 bp, Homo sapiens
atggccctgtccactgagcatcctcccgccacacagaaacccgcccagccggggccaccgaccccaccccctgcctggaaacttaaggaggccggagctgtggggagctcagagctgagatcctacaggagtccagggctggagagaaaacctctgcgaggaaagggaaggagcaagccgtgaatttaagggacgctgtgaagcaatcatggatgcaatgaagagagggctctgctgtgtgctgctgctgtgtggagcagtcttcgtttcgcccagccaggaaatccatgcccgattcagaagaggagccagatcttaccaaggttgcagcgagccaaggtgtttcaacgggggcacctgccagcaggccctgtacttctcagatttcgtgtgccagtgccccgaaggatttgctgggaagtgctgtgaaatagataccagggccacgtgctacgaggaccagggcatcagctacaggggcacgtggagcacagcggagagtggcgccgagtgcaccaactggaacagcagcgcgttggcccagaagccctacagcgggcggaggccagacgccatcaggctgggcctggggaaccacaactactgcagaaacccagatcgagactcaaagccctggtgctacgtctttaaggcggggaagtacagctcagagttctgcagcacccctgcctgctctgagggaaacagtgactgctactttgggaatgggtcagcctaccgtggcacgcacagcctcaccgagtcgggtgcctcctgcctcccgtggaattccatgatcctgataggcaaggtttacacagcacagaaccccagtgcccaggcactgggcctgggcaaacataattactgccggaatcctgatggggatgccaagccctggtgccacgtgctgaagaaccgcaggctgacgtgggagtactgtgatgtgccctcctgctccacctgcggcctgagacagtacagccagcctcagtttcgcatcaaaggagggctcttcgccgacatcgcctcccacccctggcaggctgccatctttgccaagcacaggaggtcgcccggagagcggttcctgtgcgggggcatactcatcagctcctgctggattctctctgccgcccactgcttccaggagaggtttccgccccaccacctgacggtgatcttgggcagaacataccgggtggtccctggcgaggaggagcagaaatttgaagtcgaaaaatacattgtccataaggaattcgatgatgacacttacgacaatgacattgcgctgctgcagctgaaatcggattcgtcccgctgtgcccaggagagcagcgtggtccgcactgtgtgccttcccccggcggacctgcagctgccggactggacggagtgtgagctctccggctacggcaagcatgaggccttgtctcctttctattcggagcggctgaaggaggctcatgtcagactgtacccatccagccgctgcacatcacaacatttacttaacagaacagtcaccgacaacatgctgtgtgctggagacactcggagcggcgggccccaggcaaacttgcacgacgcctgccagggcgattcgggaggccccctggtgtgtctgaacgatggccgcatgactttggtgggcatcatcagctggggcctgggctgtggacagaaggatgtcccgggtgtgtacaccaaggttaccaactacctagactggattcgtgacaacatgcgaccgtgaccaggaacacccgactcctcaaaagcaaatgagatcccgcctcttcttcttcagaagacactgcaaaggcgcagtgcttctctacagacttctccagacccaccacaccgcagaagcgggacgagaccctacaggagagggaagagtgcattttcccagatacttcccattttggaagttttcaggacttggtctgatttcaggatactctgtcagatgggaagacatgaatgcacactagcctctccaggaatgcctcctccctgggcagaaagtggccatgccaccctgttttcagctaaagcccaacctcctgacctgtcaccgtgagcagctttggaaacaggaccacaaaaatgaaagcatgtctcaatagtaaaagataacaagatctttcaggaaagacggattgcattagaaatagacagtatatttatagtcacaagagcccagcagggcctcaaagttggggcaggctggctggcccgtcatgttcctcaaaagcacccttgacgtcaagtctccttcccctttccccactccctggctctcagaaggtattccttttgtgtacagtgtgtaaagtgtaaatcctttttctttataaactttagagtagcatgagagaattgtatcatttgaacaactaggcttcagcatatttatagcaatccatgttagtttttactttctgttgccacaaccctgttttatactgtacttaataaattcagatatatttttcacagtttttccaaaaaaaaaaaaaaaaaaa

SEQ ID NO: 224 - protein, 516 aa, Homo sapiens
MDAMKRGLCCVLLLCGAVFVSPSQEIHARFRRGARSYQGCSEPRCFNGGTCQQALYFSDFVCQCPEGFAGKCCEIDTRATCYEDQGISYRGTWSTAESGAECTNWNSSALAQKPYSGRRPDAIRLGLGNHNYCRNPDRDSKPWCYVFKAGKYSSEFCSTPACSEGNSDCYFGNGSAYRGTHSLTESGASCLPWNSMILIGKVYTAQNPSAQALGLGKHNYCRNPDGDAKPWCHVLKNRRLTWEYCDVPSCSTCGLRQYSQPQFRIKGGLFADIASHPWQAAIFAKHRRSPGERFLCGGILISSCWILSAAHCFQERFPPHHLTVILGRTYRVVPGEEEQKFEVEKYIVHKEFDDDTYDNDIALLQLKSDSSRCAQESSVVRTVCLPPADLQLPDWTECELSGYGKHEALSPFYSERLKEAHVRLYPSSRCTSQHLLNRTVTDNMLCAGDTRSGGPQANLHDACQGDSGGPLVCLNDGRMTLVGIISWGLGCGQKDVPGVYTKVTNYLDWIRDNMRP

SEQ ID NO: 225 - DNA, 2732 bp, Homo sapiens
aacaacatcctgggattgggacccactttctgggcactgctggccagtcccaaaatggaacataaggaagtggttcttctacttcttttatttctgaaatcaggtcaaggagagcctctggatgactatgtgaatacccagggggcttcactgttcagtgtcactaagaagcagctgggagcaggaagtatagaagaatgtgcagcaaaatgtgaggaggacgaagaattcacctgcagggcattccaatatcacagtaaagagcaacaatgtgtgataatggctgaaaacaggaagtcctccataatcattaggatgagagatgtagttttatttgaaaagaaagtgtatctctcagagtgcaagactgggaatggaaagaactacagagggacgatgtccaaaacaaaaaatggcatcacctgtcaaaaatggagttccacttctccccacagacctagattctcacctgctacacacccctcagagggactggaggagaactactgcaggaatccagacaacgatccgcaggggccctggtgctatactactgatccagaaaagagatatgactactgcgacattcttgagtgtgaagaggaatgtatgcattgcagtggagaaaactatgacggcaaaatttccaagaccatgtctggactggaatgccaggcctgggactctcagagcccacacgctcatggatacattccttccaaatttccaaacaagaacctgaagaagaattactgtcgtaaccccgatagggagctgcggccttggtgtttcaccaccgaccccaacaagcgctgggaactttgcgacatcccccgctgcacaacacctccaccatcttctggtcccacctaccagtgtctgaagggaacaggtgaaaactatcgcgggaatgtggctgttaccgtttccgggcacacctgtcagcactggagtgcacagacccctcacacacataacaggacaccagaaaacttcccctgcaaaaatttggatgaaaactactgccgcaatcctgacggaaaaagggccccatggtgccatacaaccaacagccaagtgcggtgggagtactgtaagataccgtcctgtgactcctccccagtatccacggaacaattggctcccacagcaccacctgagctaacccctgtggtccaggactgctaccatggtgatggacagagctaccgaggcacatcctccaccaccaccacaggaaagaagtgtcagtcttggtcatctatgacaccacaccggcaccagaagaccccagaaaactacccaaatgctggcctgacaatgaactactgcaggaatccagatgccgataaaggcccctggtgttttaccacagaccccagcgtcaggtgggagtactgcaacctgaaaaaatgctcaggaacagaagcgagtgttgtagcacctccgcctgttgtcctgcttccagatgtagagactccttccgaagaagactgtatgtttgggaatgggaaaggataccgaggcaagagggcgaccactgttactgggacgccatgccaggactgggctgcccaggagccccatagacacagcattttcactccagagacaaatccacgggcgggtctggaaaaaaattactgccgtaaccctgatggtgatgtaggtggtccctggtgctacacgacaaatccaagaaaactttacgactactgtgatgtccctcagtgtgcggccccttcatttgattgtgggaagcctcaagtggagccgaagaaatgtcctggaagggttgtgggggggtgtgtggcccacccacattcctggccctggcaagtcagtcttagaacaaggtttggaatgcacttctgtggaggcaccttgatatccccagagtgggtgttgactgctgcccactgcttggagaagtccccaaggccttcatcctacaaggtcatcctgggtgcacaccaagaagtgaatctcgaaccgcatgttcaggaaatagaagtgtctaggctgttcttggagcccacacgaaaagatattgccttgctaaagctaagcagtcctgccgtcatcactgacaaagtaatcccagcttgtctgccatccccaaattatgtggtcgctgaccggaccgaatgtttcatcactggctggggagaaacccaaggtacttttggagctggccttctcaaggaagcccagctccctgtgattgagaataaagtgtgcaatcgctatgagtttctgaatggaagagtccaatccaccgaactctgtgctgggcatttggccggaggcactgacagttgccagggtgacagtggaggtcctctggtttgcttcgagaaggacaaatacattttacaaggagtcacttcttggggtcttggctgtgcacgccccaataagcctggtgtctatgttcgtgtttcaaggtttgttacttggattgagggagtgatgagaaataattaattggacgggagacagagtgacgcactgactcacctagaggctgggacgtgggtagggatttagcatgctggaaataactggcagtaatcaaacgaagacactgtccccagctaccagctacgccaaacctcggcattttttgtgttattttctgactgctggattctgtagtaaggtgacatagctatgacatttgttaaaaataaactctgtacttaactttgatttgagtaaattttggtttt

SEQ ID NO: 226 - protein, 810 aa, Homo sapiens
MEHKEVVLLLLLFLKSGQGEPLDDYVNTQGASLFSVTKKQLGAGSIEECAAKCEEDEEFTCRAFQYHSKEQQCVIMAENRKSSIIIRMRDVVLFEKKVYLSECKTGNGKNYRGTMSKTKNGITCQKWSSTSPHRPRFSPATHPSEGLEENYCRNPDNDPQGPWCYTTDPEKRYDYCDILECEEECMHCSGENYDGKISKTMSGLECQAWDSQSPHAHGYIPSKFPNKNLKKNYCRNPDRELRPWCFTTDPNKRWELCDIPRCTTPPPSSGPTYQCLKGTGENYRGNVAVTVSGHTCQHWSAQTPHTHNRTPENFPCKNLDENYCRNPDGKRAPWCHTTNSQVRWEYCKIPSCDSSPVSTEQLAPTAPPELTPVVQDCYHGDGQSYRGTSSTTTTGKKCQSWSSMTPHRHQKTPENYPNAGLTMNYCRNPDADKGPWCFTTDPSVRWEYCNLKKCSGTEASVVAPPPVVLLPDVETPSEEDCMFGNGKGYRGKRATTVTGTPCQDWAAQEPHRHSIFTPETNPRAGLEKNYCRNPDGDVGGPWCYTTNPRKLYDYCDVPQCAAPSFDCGKPQVEPKKCPGRVVGGCVAHPHSWPWQVSLRTRFGMHFCGGTLISPEWVLTAAHCLEKSPRPSSYKVILGAHQEVNLEPHVQEIEVSRLFLEPTRKDIALLKLSSPAVITDKVIPACLPSPNYVVADRTECFITGWGETQGTFGAGLLKEAQLPVIENKVCNRYEFLNGRVQSTELCAGHLAGGTDSCQGDSGGPLVCFEKDKYILQGVTSWGLGCARPNKPGVYVRVSRFVTWIEGVMRNN

SEQ ID NO: 227 - DNA, 1527 bp, Homo sapiens
ggcggacaaagcccgattgttcctgggccctttccccatcgcgcctgggcctgctccccagcccggggcaggggcgggggccagtgtggtgacacacgctgtagctgtctccccggctggctggctcgctctctcctggggacacagaggtcggcaggcagcacacagagggacctacgggcagctgttccttcccccgactcaagaatccccggaggcccggaggcctgcagcaggagcggccatgaagaagctgatggtggtgctgagtctgattgctgcagcctgggcagaggagcagaataagttggtgcatggcggaccctgcgacaagacatctcacccctaccaagctgccctctacacctcgggccacttgctctgtggtggggtccttatccatccactgtgggtcctcacagctgcccactgcaaaaaaccgaatcttcaggtcttcctggggaagcataaccttcggcaaagggagagttcccaggagcagagttctgttgtccgggctgtgatccaccctgactatgatgccgccagccatgaccaggacatcatgctgttgcgcctggcacgcccagccaaactctctgaactcatccagccccttcccctggagagggactgctcagccaacaccaccagctgccacatcctgggctggggcaagacagcagatggtgatttccctgacaccatccagtgtgcatacatccacctggtgtcccgtgaggagtgtgagcatgcctaccctggccagatcacccagaacatgttgtgtgctggggatgagaagtacgggaaggattcctgccagggtgattctgggggtccgctggtatgtggagaccacctccgaggccttgtgtcatggggtaacatcccctgtggatcaaaggagaagccaggagtctacaccaacgtctgcagatacacgaactggatccaaaaaaccattcaggccaagtgaccctgacatgtgacatctacctcccgacctaccaccccactggctggttccagaacgtctctcacctagaccttgcctcccctcctctcctgcccagctctgaccctgatgcttaataaacgcagcgacgtgagggtcctgattctccctggttttaccccagctccatccttgcatcactggggaggacgtgatgagtgaggacttgggtcctcggtcttacccccaccactaagagaatacaggaaaatcccttctaggcatctcctctccccaacccttccacacgtttgatttcttcctgcagaggcccagccacgtgtctggaatcccagctccgctgcttactgtcggtgtccccttgggatgtacctttcttcactgcagatttctcacctgtaagatgaagataaggatgatacagtctccataaggcagtggctgttggaaagatttaaggtttcacacctatgacatacatggaatagcacctgggccaccatgcactcaataaagaatgaattttattatgaaaaaaaaaaaaaaaa

SEQ ID NO: 228 - protein, 244 aa, Homo sapiens
MKKLMVVLSLIAAAWAEEQNKLVHGGPCDKTSHPYQAALYTSGHLLCGGVLIHPLWVLTAAHCKKPNLQVFLGKHNLRQRESSQEQSSVVRAVIHPDYDAASHDQDIMLLRLARPAKLSELIQPLPLERDCSANTTSCHILGWGKTADGDFPDTIQCAYIHLVSREECEHAYPGQITQNMLCAGDEKYGKDSCQGDSGGPLVCGDHLRGLVSWGNIPCGSKEKPGVYTNVCRYTNWIQKTIQAK

SEQ ID NO: 229 - DNA, 1527 bp, Homo sapiens
aggacgttccagaagcatctggggacagaaccagcctcttccagggaggcctgggagctgggggtgtgtgtctggcagtccctgcagccctgggctctgcggcccctgcgtcctccgcttggctctgccactgcatctgagtgtcttctctcctcacggctccccgcatttctaactctttctgcctcctcgtctcaaagctgttccttcccccgactcaagaatccccggaggcccggaggcctgcagcaggagcggccatgaagaagctgatggtggtgctgagtctgattgctgcagcctgggcagaggagcagaataagttggtgcatggcggaccctgcgacaagacatctcacccctaccaagctgccctctacacctcgggccacttgctctgtggtggggtccttatccatccactgtgggtcctcacagctgcccactgcaaaaaaccgaatcttcaggtcttcctggggaagcataaccttcggcaaagggagagttcccaggagcagagttctgttgtccgggctgtgatccaccctgactatgatgccgccagccatgaccaggacatcatgctgttgcgcctggcacgcccagccaaactctctgaactcatccagccccttcccctggagagggactgctcagccaacaccaccagctgccacatcctgggctggggcaagacagcagatggtgatttccctgacaccatccagtgtgcatacatccacctggtgtcccgtgaggagtgtgagcatgcctaccctggccagatcacccagaacatgttgtgtgctggggatgagaagtacgggaaggattcctgccagggtgattctgggggtccgctggtatgtggagaccacctccgaggccttgtgtcatggggtaacatcccctgtggatcaaaggagaagccaggagtctacaccaacgtctgcagatacacgaactggatccaaaaaaccattcaggccaagtgaccctgacatgtgacatctacctcccgacctaccaccccactggctggttccagaacgtctctcacctagaccttgcctcccctcctctcctgcccagctctgaccctgatgcttaataaacgcagcgacgtgagggtcctgattctccctggttttaccccagctccatccttgcatcactggggaggacgtgatgagtgaggacttgggtcctcggtcttacccccaccactaagagaatacaggaaaatcccttctaggcatctcctctccccaacccttccacacgtttgatttcttcctgcagaggcccagccacgtgtctggaatcccagctccgctgcttactgtcggtgtccccttgggatgtacctttcttcactgcagatttctcacctgtaagatgaagataaggatgatacagtctccataaggcagtggctgttggaaagatttaaggtttcacacctatgacatacatggaatagcacctgggccaccatgcactcaataaagaatgaattttattatg

SEQ ID NO: 230 - protein, 244 aa, Homo sapiens; identical to SEQ ID NO: 228

SEQ ID NO: 231 - DNA, 1495 bp, Homo sapiens
aggacgttccagaagcatctggggacagaaccagcctcttccagggaggcctgggagctgggggtgtgtgtctggcagtccctgcagccctgggctctgcggcccctgcgtcctccgcttggctctgccactgcatctgagtgtcttctctcctcacggctccccgcatttctaactctttctgcctcctcgtctcaaagctgttccttcccccgactcaagaatccccggaggcccggaggcctgcagcagcctgggcagaggagcagaataagttggtgcatggcggaccctgcgacaagacatctcacccctaccaagctgccctctacacctcgggccacttgctctgtggtggggtccttatccatccactgtgggtcctcacagctgcccactgcaaaaaaccgaatcttcaggtcttcctggggaagcataaccttcggcaaagggagagttcccaggagcagagttctgttgtccgggctgtgatccaccctgactatgatgccgccagccatgaccaggacatcatgctgttgcgcctggcacgcccagccaaactctctgaactcatccagccccttcccctggagagggactgctcagccaacaccaccagctgccacatcctgggctggggcaagacagcagatggtgatttccctgacaccatccagtgtgcatacatccacctggtgtcccgtgaggagtgtgagcatgcctaccctggccagatcacccagaacatgttgtgtgctggggatgagaagtacgggaaggattcctgccagggtgattctgggggtccgctggtatgtggagaccacctccgaggccttgtgtcatggggtaacatcccctgtggatcaaaggagaagccaggagtctacaccaacgtctgcagatacacgaactggatccaaaaaaccattcaggccaagtgaccctgacatgtgacatctacctcccgacctaccaccccactggctggttccagaacgtctctcacctagaccttgcctcccctcctctcctgcccagctctgaccctgatgcttaataaacgcagcgacgtgagggtcctgattctccctggttttaccccagctccatccttgcatcactggggaggacgtgatgagtgaggacttgggtcctcggtcttacccccaccactaagagaatacaggaaaatcccttctaggcatctcctctccccaacccttccacacgtttgatttcttcctgcagaggcccagccacgtgtctggaatcccagctccgctgcttactgtcggtgtccccttgggatgtacctttcttcactgcagatttctcacctgtaagatgaagataaggatgatacagtctccataaggcagtggctgttggaaagatttaaggtttcacacctatgacatacatggaatagcacctgggccaccatgcactcaataaagaatgaattttattatgaaaaaaaaaaaaaaaa

SEQ ID NO: 232 - protein, 137 aa, Homo sapiens
MLLRLARPAKLSELIQPLPLERDCSANTTSCHILGWGKTADGDFPDTIQCAYIHLVSREECEHAYPGQITQNMLCAGDEKYGKDSCQGDSGGPLVCGDHLRGLVSWGNIPCGSKEKPGVYTNVCRYTNWIQKTIQAK

SEQ ID NO: 233 - DNA, 1386 bp, Homo sapiens
aggacgttccagaagcatctggggacagaaccagcctcttccagggaggcctgggagctgggggtgtgtgtctggcagtccctgcagccctgggctctgcggcccctgcgtcctccgcttggctctgccactgcatctgagtgtcttctctcctcacggctccccgcatttctaactctttctgcctcctcgtctcaaagctgttccttcccccgactcaagaatccccggaggcccggaggcctgcagcaggagcggccatgaagaagctgatggtggtgctgagtctgattgctgcaggaatcttcaggtcttcctggggaagcataaccttcggcaaagggagagttcccaggagcagagttctgttgtccgggctgtgatccaccctgactatgatgccgccagccatgaccaggacatcatgctgttgcgcctggcacgcccagccaaactctctgaactcatccagccccttcccctggagagggactgctcagccaacaccaccagctgccacatcctgggctggggcaagacagcagatggtgatttccctgacaccatccagtgtgcatacatccacctggtgtcccgtgaggagtgtgagcatgcctaccctggccagatcacccagaacatgttgtgtgctggggatgagaagtacgggaaggattcctgccagggtgattctgggggtccgctggtatgtggagaccacctccgaggccttgtgtcatggggtaacatcccctgtggatcaaaggagaagccaggagtctacaccaacgtctgcagatacacgaactggatccaaaaaaccattcaggccaagtgaccctgacatgtgacatctacctcccgacctaccaccccactggctggttccagaacgtctctcacctagaccttgcctcccctcctctcctgcccagctctgaccctgatgcttaataaacgcagcgacgtgagggtcctgattctccctggttttaccccagctccatccttgcatcactggggaggacgtgatgagtgaggacttgggtcctcggtcttacccccaccactaagagaatacaggaaaatcccttctaggcatctcctctccccaacccttccacacgtttgatttcttcctgcagaggcccagccacgtgtctggaatcccagctccgctgcttactgtcggtgtccccttgggatgtacctttcttcactgcagatttctcacctgtaagatgaagataaggatgatacagtctccataaggcagtggctgttggaaagatttaaggtttcacacctatgacatacatggaatagcacctgggccaccatgcactcaataaagaatgaattttattatgaaaaaaaaaaaaaaaa

SEQ ID NO: 234 - protein, 40 aa, Homo sapiens
MKKLMVVLSLIAAGIFRSSWGSITFGKGRVPRSRVLLSGL

SEQ ID NO: 235 - DNA, 3351 bp, Homo sapiens
gcccgagaagctggggagcatggaccagaccccgcagcgctggcaccatgacgctcgcccgcttcgtgctagccctgatgttaggggcgctccccgaagtggtcggctttgattctgtcctcaatgattccctccaccacagccaccgccattcgccccctgcgggtccgcactacccctattaccttcccacccagcagcggcccccgacgacgcgtccgccgccgcctctcccgcgcttcccgcgccccccgcgggcgctccctgcccagcgcccgcacgccctccaggccgggcacacgccccggccgcacccctggggctgccccgccggcgagccatgggtcagcgtgacggacttcggcgccccgtgtctgcggtgggcggaggtgccacccttcctggagcggtcgcccccagcgagctgggctcagctgcgaggacagcgccacaacttttgtcggagccccgacggcgcgggcagaccctggtgtttctacggagacgcccgtggcaaggtggactggggctactgcgactgcagacacggatcagtacgacttcgtggcggcaaaaatgagtttgaaggcacagtggaagtatatgcaagtggagtttggggcactgtctgtagcagccactgggatgattctgatgcatcagtcatttgtcaccagctgcagctgggaggaaaaggaatagcaaaacaaaccccgttttctggactgggccttattcccatttattggagcaatgtccgttgccgaggagatgaagaaaatatactgctttgtgaaaaagacatctggcagggtggggtgtgtcctcagaagatggcagctgctgtcacgtgtagcttttcccatggcccaacgttccccatcattcgccttgctggaggcagcagtgtgcatgaaggccgggtggagctctaccatgctggccagtggggaaccgtttgtgatgaccaatgggatgatgccgatgcagaagtgatctgcaggcagctgggcctcagtggcattgccaaagcatggcatcaggcatattttggggaagggtctggcccagttatgttggatgaagtacgctgcactgggaatgagctttcaattgagcagtgtccaaagagctcctggggagagcataactgtggccataaagaagatgctggagtgtcctgtacccctctaacagatggggtcatcagacttgcaggtgggaaaggcagccatgagggtcgcttggaggtatattacagaggccagtggggaactgtctgtgatgatggctggactgagctgaatacatacgtggtttgtcgacagttgggatttaaatatggtaaacaagcatctgccaaccattttgaagaaagcacagggcccatatggttggatgacgtcagctgctcaggaaaggaaaccagatttcttcagtgttccaggcgacagtggggaaggcatgactgcagccaccgcgaagatgttagcattgcctgctaccctggcggcgagggacacaggctctctctgggttttcctgtcagactgatggatggagaaaataagaaagaaggacgagtggaggtttttatcaatggccagtggggaacaatctgtgatgatggatggactgataaggatgcagctgtgatctgtcgtcagcttggctacaagggtcctgccagagcaagaaccatggcttactttggagaaggaaaaggacccatccatgtggataatgtgaagtgcacaggaaatgagaggtccttggctgactgtatcaagcaagatattggaagacacaactgccgccacagtgaagatgcaggagttatttgtgattattttggcaagaaggcctcaggtaacagtaataaagagtccctctcatctgtttgtggcttgagattactgcaccgtcggcagaagcggatcattggtgggaaaaattctttaaggggtggttggccttggcaggtttccctccggctgaagtcatcccatggagatggcaggctcctctgcggggctacgctcctgagtagctgctgggtcctcacagcagcacactgtttcaagaggtatggcaacagcactaggagctatgctgttagggttggagattatcatactctggtaccagaggagtttgaggaagaaattggagttcaacagattgtgattcatcgggagtatcgacccgaccgcagtgattatgacatagccctggttagattacaaggaccagaagagcaatgtgccagattcagcagccatgttttgccagcctgtttaccactctggagagagaggccacagaaaacagcatccaactgttacataacaggatggggtgacacaggacgagcctattcaagaacactacaacaagcagccattcccttacttcctaaaaggttttgtgaagaacgttataagggtcggtttacagggagaatgctttgtgctggaaacctccatgaacacaaacgcgtggacagctgccagggagacagcggaggaccactcatgtgtgaacggcccggagagagctgggtggtgtatggggtgacctcctgggggtatggctgtggagtcaaggattctcctggtgtttataccaaagtctcagcctttgtaccttggataaaaagtgtcaccaaactgtaattcttcatggaaacttcaaagcagcatttaaacaaatggaaaactttgaacccccactattagcactcagcagagatgacaacaaatggcaagatctgtttttgctttgtgttgtggtaaaaaattgtgtaccccctgctgcttttgagaaatttgtgaacattttcagaggcctcagtgtagtggaagtgataatccttaaatgaacattttctaccctaatttcactggagtgacttattctaagcctcatctatcccctacctatttctcaaaatcattctatgctgattttacaaaagatcatttttacatttgaactgagaaccccttttaattgaatcagtggtgtctgaaatcatattaaatacccacatttgacataaatgcggtaccctttactacactcatgagtggcatatttatgcttaggtcttttcaaaagacttgacaagaaatcttcatattctctgtagcctttgtcaagtgaggaaatcagtggttaaagaattccactataaacttttaggcctgaataggagtagtaaagcctcaaggacatctgcctgtcacaatatattctcaaagtgatctgatatttggaaacaagtatccttgttgagtaccaagtgctacagaaaccataagataaaaatactttctacctacagcgtgc

SEQ ID NO: 236 - protein, 875 aa, Homo sapiens
MTLARFVLALMLGALPEVVGFDSVLNDSLHHSHRHSPPAGPHYPYYLPTQQRPPTTRPPPPLPRFPRPPRALPAQRPHALQAGHTPRPHPWGCPAGEPWVSVTDFGAPCLRWAEVPPFLERSPPASWAQLRGQRHNFCRSPDGAGRPWCFYGDARGKVDWGYCDCRHGSVRLRGGKNEFEGTVEVYASGVWGTVCSSHWDDSDASVICHQLQLGGKGIAKQTPFSGLGLIPIYWSNVRCRGDEENILLCEKDIWQGGVCPQKMAAAVTCSFSHGPTFPIIRLAGGSSVHEGRVELYHAGQWGTVCDDQWDDADAEVICRQLGLSGIAKAWHQAYFGEGSGPVMLDEVRCTGNELSIEQCPKSSWGEHNCGHKEDAGVSCTPLTDGVIRLAGGKGSHEGRLEVYYRGQWGTVCDDGWTELNTYVVCRQLGFKYGKQASANHFEESTGPIWLDDVSCSGKETRFLQCSRRQWGRHDCSHREDVSIACYPGGEGHRLSLGFPVRLMDGENKKEGRVEVFINGQWGTICDDGWTDKDAAVICRQLGYKGPARARTMAYFGEGKGPIHVDNVKCTGNERSLADCIKQDIGRHNCRHSEDAGVICDYFGKKASGNSNKESLSSVCGLRLLHRRQKRIIGGKNSLRGGWPWQVSLRLKSSHGDGRLLCGATLLSSCWVLTAAHCFKRYGNSTRSYAVRVGDYHTLVPEEFEEEIGVQQIVIHREYRPDRSDYDIALVRLQGPEEQCARFSSHVLPACLPLWRERPQKTASNCYITGWGDTGRAYSRTLQQAAIPLLPKRFCEERYKGRFTGRMLCAGNLHEHKRVDSCQGDSGGPLMCERPGESWVVYGVTSWGYGCGVKDSPGVYTKVSAFVPWIKSVTKL

SEQ ID NO: 237 - DNA, 1165 bp, Homo sapiens
agaaggaacagggagcggccaggatgctgaatctgctgctgctggcgctgcccgtcctggcgagccgcgcctacgcggcccctgccccaggccaggccctgcagcgagtgggcatcgttgggggtcaggaggcccccaggagcaagtggccctggcaggtgagcctgagagtccgcgaccgatactggatgcacttctgcgggggctccctcatccacccccagtgggtgctgaccgcagcgcactgcgtgggaccggacgtcaaggatctggccgccctcagggtgcaactgcgggagcagcacctctactaccaggaccagctgctgccggtcagcaggatcatcgtgcacccacagttctacaccgcccagatcggagcggacatcgccctgctggagctggaggagccggtgaacgtctccagccacgtccacacggtcaccctgccccctgcctcagagaccttccccccggggatgccgtgctgggtcactggctggggcgatgtggacaatgatgagcgcctcccaccgccatttcctctgaagcaggtgaaggtccccataatggaaaaccacatttgtgacgcaaaataccaccttggcgcctacacgggagacgacgtccgcatcgtccgtgacgacatgctgtgtgccgggaacacccggagggactcatgccagggcgactccggagggcccctggtgtgcaaggtgaatggcacctggctgcaggcgggcgtggtcagctggggcgagggctgtgcccagcccaaccggcctggcatctacacccgtgtcacctactacttggactggatccaccactatgtccccaaaaagccgtgagtcaggcctggggtgtccacctgggtcactggagagccagcccctcctgtccaaaacaccactgcttcctacccaggtggcgactgccccccacaccttccctgccccgtcctgagtgccccttcctgtcctaagccccctgctctcttctgagccccttcccctgtcctgaggacccttccccatcctgagcccccttccctgtcctaagcctgacgcctgcaccgggccctccggccctcccctgcccaggcagctggtggtgggcgctaatcctcctgagtgctggacctcattaaagtgcatggaaatca

SEQ ID NO: 238 - protein, 275 aa, Homo sapiens
MLNLLLLALPVLASRAYAAPAPGQALQRVGIVGGQEAPRSKWPWQVSLRVRDRYWMHFCGGSLIHPQWVLTAAHCVGPDVKDLAALRVQLREQHLYYQDQLLPVSRIIVHPQFYTAQIGADIALLELEEPVNVSSHVHTVTLPPASETFPPGMPCWVTGWGDVDNDERLPPPFPLKQVKVPIMENHICDAKYHLGAYTGDDVRIVRDDMLCAGNTRRDSCQGDSGGPLVCKVNGTWLQAGVVSWGEGCAQPNRPGIYTRVTYYLDWIHHYVPKKP

SEQ ID NO: 239 - DNA, 1013 bp, Homo sapiens
gttcccagaagctccccaggctctagtgcaggaggagaaggaggaggagcaggaggtggagattcccagttaaaaggctccagaatcgtgtaccaggcagagaactgaagtactggggcctcctccactgggtccgaatcagtaggtgaccccgcccctggattctggaagacctcaccatgggacgcccccgacctcgtgcggccaagacgtggatgttcctgctcttgctggggggagcctgggcaggacactccagggcacaggaggacaaggtgctggggggtcatgagtgccaaccccattcgcagccttggcaggcggccttgttccagggccagcaactactctgtggcggtgtccttgtaggtggcaactgggtccttacagctgcccactgtaaaaaaccgaaatacacagtacgcctgggagaccacagcctacagaataaagatggcccagagcaagaaatacctgtggttcagtccatcccacacccctgctacaacagcagcgatgtggaggaccacaaccatgatctgatgcttcttcaactgcgtgaccaggcatccctggggtccaaagtgaagcccatcagcctggcagatcattgcacccagcctggccagaagtgcaccgtctcaggctggggcactgtcaccagtccccgagagaattttcctgacactctcaactgtgcagaagtaaaaatctttccccagaagaagtgtgaggatgcttacccggggcagatcacagatggcatggtctgtgcaggcagcagcaaaggggctgacacgtgccagggcgattctggaggccccctggtgtgtgatggtgcactccagggcatcacatcctggggctcagacccctgtgggaggtccgacaaacctggcgtctataccaacatctgccgctacctggactggatcaagaagatcataggcagcaagggctgattctaggataagcactagatctcccttaataaactcacaactctctggttc

SEQ ID NO: 240 - protein, 260 aa, Homo sapiens
MGRPRPRAAKTWMFLLLLGGAWAGHSRAQEDKVLGGHECQPHSQPWQAALFQGQQLLCGGVLVGGNWVLTAAHCKKPKYTVRLGDHSLQNKDGPEQEIPVVQSIPHPCYNSSDVEDHNHDLMLLQLRDQASLGSKVKPISLADHCTQPGQKCTVSGWGTVTSPRENFPDTLNCAEVKIFPQKKCEDAYPGQITDGMVCAGSSKGADTCQGDSGGPLVCDGALQGITSWGSDPCGRSDKPGVYTNICRYLDWIKKIIGSKG

SEQ ID NO: 241 - DNA, 1148 bp, Homo sapiens
gttcccagaagctccccaggctctagtgcaggaggagaaggaggaggagcaggaggtggagattcccagttaaaaggctccagaatcgtgtaccaggcagagaactgaagtactggggcctcctccactgggtccgaatcagtaggtgaccccgcccctggattctggaagacctcaccatgggacgcccccgacctcgtgcggccaagacgtggatgttcctgctcttgctggggggagcctgggcagcgtgtggaagcctggacctcctcactaagttgtatgcggagaacttgccgtgtgtccatttgaacccacagtggccttcccagccctcgcactgccccagagggtggcgatccaaccctctccctcctgctgcaggacactccagggcacaggaggacaaggtgctggggggtcatgagtgccaaccccattcgcagccttggcaggcggccttgttccagggccagcaactactctgtggcggtgtccttgtaggtggcaactgggtccttacagctgcccactgtaaaaaaccgaaatacacagtacgcctgggagaccacagcctacagaataaagatggcccagagcaagaaatacctgtggttcagtccatcccacacccctgctacaacagcagcgatgtggaggaccacaaccatgatctgatgcttcttcaactgcgtgaccaggcatccctggggtccaaagtgaagcccatcagcctggcagatcattgcacccagcctggccagaagtgcaccgtctcaggctggggcactgtcaccagtccccgagagaattttcctgacactctcaactgtgcagaagtaaaaatctttccccagaagaagtgtgaggatgcttacccggggcagatcacagatggcatggtctgtgcaggcagcagcaaaggggctgacacgtgccagggcgattctggaggccccctggtgtgtgatggtgcactccagggcatcacatcctggggctcagacccctgtgggaggtccgacaaacctggcgtctataccaacatctgccgctacctggactggatcaagaagatcataggcagcaagggctgattctaggataagcactagatctcccttaataaactcacaactctctggttc

SEQ ID NO: 242 - protein, 305 aa, Homo sapiens
MGRPRPRAAKTWMFLLLLGGAWAACGSLDLLTKLYAENLPCVHLNPQWPSQPSHCPRGWRSNPLPPAAGHSRAQEDKVLGGHECQPHSQPWQAALFQGQQLLCGGVLVGGNWVLTAAHCKKPKYTVRLGDHSLQNKDGPEQEIPVVQSIPHPCYNSSDVEDHNHDLMLLQLRDQASLGSKVKPISLADHCTQPGQKCTVSGWGTVTSPRENFPDTLNCAEVKIFPQKKCEDAYPGQITDGMVCAGSSKGADTCQGDSGGPLVCDGALQGITSWGSDPCGRSDKPGVYTNICRYLDWIKKIIGSKG

SEQ ID NO: 243 - DNA, 590 bp, Homo sapiens
gttcccagaagctccccaggctctagtgcaggaggagaaggaggaggagcaggaggtggagattcccagttaaaaggctccagaatcgtgtaccaggcagagaactgaagtactggggcctcctccactgggtccgaatcagtaggtgaccccgcccctggattctggaagacctcaccatgggacgcccccgacctcgtgcggccaagacgtggatgttcctgctcttgctggggggagcctgggcagagaattttcctgacactctcaactgtgcagaagtaaaaatctttccccagaagaagtgtgaggatgcttacccggggcagatcacagatggcatggtctgtgcaggcagcagcaaaggggctgacacgtgccagggcgattctggaggccccctggtgtgtgatggtgcactccagggcatcacatcctggggctcagacccctgtgggaggtccgacaaacctggcgtctataccaacatctgccgctacctggactggatcaagaagatcataggcagcaagggctgattctaggataagcactagatctcccttaataaactcacaactctctggttc

SEQ ID NO: 244 - protein, 119 aa, Homo sapiens
MGRPRPRAAKTWMFLLLLGGAWAENFPDTLNCAEVKIFPQKKCEDAYPGQITDGMVCAGSSKGADTCQGDSGGPLVCDGALQGITSWGSDPCGRSDKPGVYTNICRYLDWIKKIIGSKG

SEQ ID NO: 245 - DNA, 456 bp, Homo sapiens
gttcccagaagctccccaggctctagtgcaggaggagaaggaggaggagcaggaggtggagattcccagttaaaaggctccagaatcgtgtaccaggcagagaactgaagtactggggcctcctccactgggtccgaatcagtaggtgaccccgcccctggattctggaagacctcaccatgggacgcccccgacctcgtgcggccaagacgtggatgttcctgctcttgctggggggagcctgggcagggcgattctggaggccccctggtgtgtgatggtgcactccagggcatcacatcctggggctcagacccctgtgggaggtccgacaaacctggcgtctataccaacatctgccgctacctggactggatcaagaagatcataggcagcaagggctgattctaggataagcactagatctcccttaataaactcacaactctctggttc

SEQ ID NO: 246 - protein, 32 aa, Homo sapiens
MGRPRPRAAKTWMFLLLLGGAWAGRFWRPPGV

SEQ ID NO: 247 - DNA, 1580 bp, Homo sapiens
catcctgccacccctagccttgctggggacgtgaaccctctccccgcgcctgggaagccttcttggcaccgggacccggagaatccccacggaagccagttccaaaagggatgaaaagggggcgtttcgggcactgggagaagcctgtattccagggcccctcccagagcaggaatctgggacccaggagtgccagcctcacccacgcagatcctggccatgagagctccgcacctccacctctccgccgcctctggcgcccgggctctggcgaagctgctgccgctgctgatggcgcaactctgggccgcagaggcggcgctgctcccccaaaacgacacgcgcttggaccccgaagcctatggctccccgtgcgcgcgcggctcgcagccctggcaggtctcgctcttcaacggcctctcgttccactgcgcgggtgtcctggtggaccagagttgggtgctgacggccgcgcactgcggaaacaagccactgtgggctcgagtaggggatgaccacctgctgcttcttcagggagagcagctccgccggaccactcgctctgttgtccatcccaagtaccaccagggctcaggccccatcctgccaaggcgaacggatgagcacgatctcatgttgctgaagctggccaggcccgtagtgctggggccccgcgtccgggccctgcagcttccctaccgctgtgctcagcccggagaccagtgccaggttgctggctggggcaccacggccgcccggagagtgaagtacaacaagggcctgacctgctccagcatcactatcctgagccctaaagagtgtgaggtcttctaccctggcgtggtcaccaacaacatgatatgtgctggactggaccggggccaggacccttgccagagtgactctggaggccccctggtctgtgacgagaccctccaaggcatcctctcgtggggtgtttacccctgtggctctgcccagcatccagctgtctacacccagatctgcaaatacatgtcctggatcaataaagtcatacgctccaactgatccagatgctacgctccagctgatccagatgttatgctcctgctgatccagatgcccagaggctccatcgtccatcctcttcctccccagtcggctgaactctccccttgtctgcactgttcaaacctctgccgccctccacacctctaaacatctcccctctcacctcattcccccacctatccccattctctgcctgtactgaagctgaaatgcaggaagtggtggcaaaggtttattccagagaagccaggaagccggtcatcacccagcctctgagagcagttactggggtcacccaacctgacttcctctgccactccctgctgtgtgactttgggcaagccaagtgccctctctgaacctcagtttcctcatctgcaaaatgggaacaatgacgtgcctacctcttagacatgttgtgaggagactatgatataacatgtgtatgtaaatcttcatggtgattgtcatgtaaggcttaacacagtgggtggtgagttctgactaaaggttacctgttgtcgtga

SEQ ID NO: 248 - protein, 276 aa, Homo sapiens
MRAPHLHLSAASGARALAKLLPLLMAQLWAAEAALLPQNDTRLDPEAYGSPCARGSQPWQVSLFNGLSFHCAGVLVDQSWVLTAAHCGNKPLWARVGDDHLLLLQGEQLRRTTRSVVHPKYHQGSGPILPRRTDEHDLMLLKLARPVVLGPRVRALQLPYRCAQPGDQCQVAGWGTTAARRVKYNKGLTCSSITILSPKECEVFYPGVVTNNMICAGLDRGQDPCQSDSGGPLVCDETLQGILSWGVYPCGSAQHPAVYTQICKYMSWINKVIRSN

SEQ ID NO: 249 - DNA, 1443 bp, Homo sapiens
accagcggcagaccacaggcagggcagaggcacgtctgggtcccctccctccttcctatcggcgactcccaggatcctggccatgagagctccgcacctccacctctccgccgcctctggcgcccgggctctggcgaagctgctgccgctgctgatggcgcaactctgggccgcagaggcggcgctgctcccccaaaacgacacgcgcttggaccccgaagcctatggctccccgtgcgcgcgcggctcgcagccctggcaggtctcgctcttcaacggcctctcgttccactgcgcgggtgtcctggtggaccagagttgggtgctgacggccgcgcactgcggaaacaagccactgtgggctcgagtaggggatgaccacctgctgcttcttcagggagagcagctccgccggaccactcgctctgttgtccatcccaagtaccaccagggctcaggccccatcctgccaaggcgaacggatgagcacgatctcatgttgctgaagctggccaggcccgtagtgctggggccccgcgtccgggccctgcagcttccctaccgctgtgctcagcccggagaccagtgccaggttgctggctggggcaccacggccgcccggagagtgaagtacaacaagggcctgacctgctccagcatcactatcctgagccctaaagagtgtgaggtcttctaccctggcgtggtcaccaacaacatgatatgtgctggactggaccggggccaggacccttgccagagtgactctggaggccccctggtctgtgacgagaccctccaaggcatcctctcgtggggtgtttacccctgtggctctgcccagcatccagctgtctacacccagatctgcaaatacatgtcctggatcaataaagtcatacgctccaactgatccagatgctacgctccagctgatccagatgttatgctcctgctgatccagatgcccagaggctccatcgtccatcctcttcctccccagtcggctgaactctccccttgtctgcactgttcaaacctctgccgccctccacacctctaaacatctcccctctcacctcattcccccacctatccccattctctgcctgtactgaagctgaaatgcaggaagtggtggcaaaggtttattccagagaagccaggaagccggtcatcacccagcctctgagagcagttactggggtcacccaacctgacttcctctgccactccctgctgtgtgactttgggcaagccaagtgccctctctgaacctcagtttcctcatctgcaaaatgggaacaatgacgtgcctacctcttagacatgttgtgaggagactatgatataacatgtgtatgtaaatcttcatggtgattgtcatgtaaggcttaacacagtgggtggtgagttctgactaaaggttacctgttgtcgtga

SEQ ID NO: 250 - protein, 276 aa, Homo sapiens; identical to SEQ ID NO: 248

SEQ ID NO: 251 - DNA, 3226 bp, Homo sapiens
cgcgagctaagcaggaggcggaggcggaggcggagggcgaggggcggggagcgccgcctggagcgcggcaggtcatattgaacattccagatacctatcattactcgatgctgttgataacagcaagatggctttgaactcagggtcaccaccagctattggaccttactatgaaaaccatggataccaaccggaaaacccctatcccgcacagcccactgtggtccccactgtctacgaggtgcatccggctcagtactacccgtcccccgtgccccagtacgccccgagggtcctgacgcaggcttccaaccccgtcgtctgcacgcagcccaaatccccatccgggacagtgtgcacctcaaagactaagaaagcactgtgcatcaccttgaccctggggaccttcctcgtgggagctgcgctggccgctggcctactctggaagttcatgggcagcaagtgctccaactctgggatagagtgcgactcctcaggtacctgcatcaacccctctaactggtgtgatggcgtgtcacactgccccggcggggaggacgagaatcggtgtgttcgcctctacggaccaaacttcatccttcagatgtactcatctcagaggaagtcctggcaccctgtgtgccaagacgactggaacgagaactacgggcgggcggcctgcagggacatgggctataagaataatttttactctagccaaggaatagtggatgacagcggatccaccagctttatgaaactgaacacaagtgccggcaatgtcgatatctataaaaaactgtaccacagtgatgcctgttcttcaaaagcagtggtttctttacgctgtatagcctgcggggtcaacttgaactcaagccgccagagcaggatcgtgggcggtgagagcgcgctcccgggggcctggccctggcaggtcagcctgcacgtccagaacgtccacgtgtgcggaggctccatcatcacccccgagtggatcgtgacagccgcccactgcgtggaaaaacctcttaacaatccatggcattggacggcatttgcggggattttgagacaatctttcatgttctatggagccggataccaagtagaaaaagtgatttctcatccaaattatgactccaagaccaagaacaatgacattgcgctgatgaagctgcagaagcctctgactttcaacgacctagtgaaaccagtgtgtctgcccaacccaggcatgatgctgcagccagaacagctctgctggatttccgggtggggggccaccgaggagaaagggaagacctcagaagtgctgaacgctgccaaggtgcttctcattgagacacagagatgcaacagcagatatgtctatgacaacctgatcacaccagccatgatctgtgccggcttcctgcaggggaacgtcgattcttgccagggtgacagtggagggcctctggtcacttcgaagaacaatatctggtggctgataggggatacaagctggggttctggctgtgccaaagcttacagaccaggagtgtacgggaatgtgatggtattcacggactggatttatcgacaaatgagggcagacggctaatccacatggtcttcgtccttgacgtcgttttacaagaaaacaatggggctggttttgcttccccgtgcatgatttactcttagagatgattcagaggtcacttcatttttattaaacagtgaacttgtctggctttggcactctctgccattctgtgcaggctgcagtggctcccctgcccagcctgctctccctaaccccttgtccgcaaggggtgatggccggctggttgtgggcactggcggtcaagtgtggaggagaggggtggaggctgccccattgagatcttcctgctgagtcctttccaggggccaattttggatgagcatggagctgtcacctctcagctgctggatgacttgagatgaaaaaggagagacatggaaagggagacagccaggtggcacctgcagcggctgccctctggggccacttggtagtgtccccagcctacctctccacaaggggattttgctgatgggttcttagagccttagcagccctggatggtggccagaaataaagggaccagcccttcatgggtggtgacgtggtagtcacttgtaaggggaacagaaacatttttgttcttatggggtgagaatatagacagtgcccttggtgcgagggaagcaattgaaaaggaacttgccctgagcactcctggtgcaggtctccacctgcacattgggtggggctcctgggagggagactcagccttcctcctcatcctccctgaccctgctcctagcaccctggagagtgcacatgccccttggtcctggcagggcgccaagtctggcaccatgttggcctcttcaggcctgctagtcactggaaattgaggtccatgggggaaatcaaggatgctcagtttaaggtacactgtttccatgttatgtttctacacattgctacctcagtgctcctggaaacttagcttttgatgtctccaagtagtccaccttcatttaactctttgaaactgtatcacctttgccaagtaagagtggtggcctatttcagctgctttgacaaaatgactggctcctgacttaacgttctataaatgaatgtgctgaagcaaagtgcccatggtggcggcgaagaagagaaagatgtgttttgttttggactctctgtggtcccttccaatgctgtgggtttccaaccaggggaagggtcccttttgcattgccaagtgccataaccatgagcactactctaccatggttctgcctcctggccaagcaggctggtttgcaagaatgaaatgaatgattctacagctaggacttaaccttgaaatggaaagtcttgcaatcccatttgcaggatccgtctgtgcacatgcctctgtagagagcagcattcccagggaccttggaaacagttggcactgtaaggtgcttgctccccaagacacatcctaaaaggtgttgtaatggtgaaaacgtcttccttctttattgccccttcttatttatgtgaacaactgtttgtctttttttgtatcttttttaaactgtaaagttcaattgtgaaaatgaatatcatgcaaataaattatgcgatttttttttcaaagcaaaaaaaaaaaaaaaaaaaaaaaaaaaaaaa

SEQ ID NO: 252 - protein, 492 aa, Homo sapiens
MALNSGSPPAIGPYYENHGYQPENPYPAQPTVVPTVYEVHPAQYYPSPVPQYAPRVLTQASNPVVCTQPKSPSGTVCTSKTKKALCITLTLGTFLVGAALAAGLLWKFMGSKCSNSGIECDSSGTCINPSNWCDGVSHCPGGEDENRCVRLYGPNFILQMYSSQRKSWHPVCQDDWNENYGRAACRDMGYKNNFYSSQGIVDDSGSTSFMKLNTSAGNVDIYKKLYHSDACSSKAVVSLRCIACGVNLNSSRQSRIVGGESALPGAWPWQVSLHVQNVHVCGGSIITPEWIVTAAHCVEKPLNNPWHWTAFAGILRQSFMFYGAGYQVEKVISHPNYDSKTKNNDIALMKLQKPLTFNDLVKPVCLPNPGMMLQPEQLCWISGWGATEEKGKTSEVLNAAKVLLIETQRCNSRYVYDNLITPAMICAGFLQGNVDSCQGDSGGPLVTSKNNIWWLIGDTSWGSGCAKAYRPGVYGNVMVFTDWIYRQMRADG

SEQ ID NO: 253 - DNA, 1280 bp, Homo sapiens
atggccacagcaggaaatccctggggctggttcctggggtacctcatccttggtgtcgcaggatctctcgtctctggtagctgcagccaaatcataaacggcgaggactgcagcccgcactcgcagccctggcaggcggcactggtcatggaaaacgaattgttctgctcgggcgtcctggtgcatccgcagtgggtgctgtcagccgcacactgtttccagaactcctacaccatcgggctgggcctgcacagtcttgaggccgaccaagagccagggagccagatggtggaggccagcctctccgtacggcacccagagtacaacagacccttgctcgctaacgacctcatgctcatcaagttggacgaatccgtgtccgagtctgacaccatccggagcatcagcattgcttcgcagtgccctaccgcggggaactcttgcctcgtttctggctggggtctgctggcgaacggcagaatgcctaccgtgctgcagtgcgtgaacgtgtcggtggtgtctgaggaggtctgcagtaagctctatgacccgctgtaccaccccagcatgttctgcgccggcggagggcaagaccagaaggactcctgcaacggtgactctggggggcccctgatctgcaacgggtacttgcagggccttgtgtctttcggaaaagccccgtgtggccaagttggcgtgccaggtgtctacaccaacctctgcaaattcactgagtggatagagaaaaccgtccaggccagttaactctggggactgggaacccatgaaattgacccccaaatacatcctgcggaaggaattcaggaatatctgttcccagcccctcctccctcaggcccaggagtccaggcccccagcccctcctccctcaaaccaagggtacagatccccagcccctcctccctcagacccaggagtccagaccccccagcccctcctccctcagacccaggagtccagcccctcctccctcagacccaggagtccagaccccccagcccctcctccctcagacccaggggtccaggcccccaacccctcctccctcagactcagaggtccaagcccccaacccctccttccccagacccagaggtccaggtcccagcccctcctccctcagacccagcggtccaatgccacctagactctccctgtacacagtgcccccttgtggcacgttgacccaaccttaccagttggtttttcattttttgtccctttcccctagatccagaaataaagtctaagagaagcgc

SEQ ID NO: 254 - protein, 254 aa, Homo sapiens
MATAGNPWGWFLGYLILGVAGSLVSGSCSQIINGEDCSPHSQPWQAALVMENELFCSGVLVHPQWVLSAAHCFQNSYTIGLGLHSLEADQEPGSQMVEASLSVRHPEYNRPLLANDLMLIKLDESVSESDTIRSISIASQCPTAGNSCLVSGWGLLANGRMPTVLQCVNVSVVSEEVCSKLYDPLYHPSMFCAGGGQDQKDSCNGDSGGPLICNGYLQGLVSFGKAPCGQVGVPGVYTNLCKFTEWIEKTVQAS

SEQ ID NO: 255 - DNA, 1391 bp, Homo sapiens
acacaccctgacccgcatcgccctgggtctctcgagcctgctgcctgctcccccgccccaccagccatggtggtttctggagcgcccccagccctgggtgggggctgtctcggcaccttcacctccctgctgctgctggcgtcgacagccatcctcaatgcggccaggatacctgttcccccagcctgtgggaagccccagcagctgaaccgggttgtgggcggcgaggacagcactgacagcgagtggccctggatcgtgagcatccagaagaatgggacccaccactgcgcaggttctctgctcaccagccgctgggtgatcactgctgcccactgtttcaaggacaacctgaacaaaccatacctgttctctgtgctgctgggggcctggcagctggggaaccctggctctcggtcccagaaggtgggtgttgcctgggtggagccccaccctgtgtattcctggaaggaaggtgcctgtgcagacattgccctggtgcgtctcgagcgctccatacagttctcagagcgggtcctgcccatctgcctacctgatgcctctatccacctccctccaaacacccactgctggatctcaggctgggggagcatccaagatggagttcccttgccccaccctcagaccctgcagaagctgaaggttcctatcatcgactcggaagtctgcagccatctgtactggcggggagcaggacagggacccatcactgaggacatgctgtgtgccggctacttggagggggagcgggatgcttgtctgggcgactccgggggccccctcatgtgccaggtggacggcgcctggctgctggccggcatcatcagctggggcgagggctgtgccgagcgcaacaggcccggggtctacatcagcctctctgcgcaccgctcctgggtggagaagatcgtgcaaggggtgcagctccgcgggcgcgctcaggggggtggggccctcagggcaccgagccagggctctggggccgccgcgcgctcctagggcgcagcgggacgcggggctcggatctgaaaggcggccagatccacatctggatctggatctgcggcggcctcgggcggtttcccccgccgtaaataggctcatctacctctacctctgggggcccggacggctgctgcggaaaggaaaccccctccccgacccgcccgacggcctcaggccccgcctccaaggcatcaggccccgcccaacggcctcatgtccccgcccccacgacttccggccccgccccgggccccagcgcttttgtgtatataaatgttaatgatttttataggtatttgtaaccctgcccacatatcttatttattcctccaatttcaataaattatttattctccagtgaaaaa

SEQ ID NO: 256 - protein, 317 aa, Homo sapiens
MVVSGAPPALGGGCLGTFTSLLLLASTAILNAARIPVPPACGKPQQLNRVVGGEDSTDSEWPWIVSIQKNGTHHCAGSLLTSRWVITAAHCFKDNLNKPYLFSVLLGAWQLGNPGSRSQKVGVAWVEPHPVYSWKEGACADIALVRLERSIQFSERVLPICLPDASIHLPPNTHCWISGWGSIQDGVPLPHPQTLQKLKVPIIDSEVCSHLYWRGAGQGPITEDMLCAGYLEGERDACLGDSGGPLMCQVDGAWLLAGIISWGEGCAERNRPGVYISLSAHRSWVEKIVQGVQLRGRAQGGGALRAPSQGSGAAARS

SEQ ID NO: 257 - DNA, 1184 bp, Homo sapiens
atctgccacgatgttgctgctcagcctgaccctaagcctggttctcctcggctcctcctggggctgcggcattcctgccatcaaaccggcactgagcttcagccagaggattgtcaacggggagaatgcagtgttgggctcctggccctggcaggtgtccctgcaggacagcagcggcttccacttctgcggtggttctctcatcagccagtcctgggtggtcactgctgcccactgcaatgtcagccctggccgccattttgttgtcctgggcgagtatgaccgatcatcaaacgcagagcccttgcaggttctgtccgtctctcgggccattacacaccctagctggaactctaccaccatgaacaatgacgtgacgctgctgaagctcgcctcgccagcccagtacacaacacgcatctcgccagtttgcctggcatcctcaaacgaggctctgactgaaggcctcacgtgtgtcaccaccggctggggtcgcctcagtggcgtgggcaatgtgacaccagcacatctgcagcaggtggctttgcccctggtcactgtgaatcagtgccggcagtactggggctcaagtatcactgactccatgatctgtgcaggtggcgcaggtgcctcctcgtgccagggtgactccggaggccctcttgtctgccagaagggaaacacatgggtgcttattggtattgtctcctggggcaccaaaaactgcaatgtgcgcgcacctgctgtgtatactcgagttagcaagttcagcacctggatcaaccaggtcatagcctacaactgagctcaccacaggccctccccagctcaacccattaaagacccaggccctgtcccatcatgcattcatgtctgtcttcctggctcaggagaaagaagaggctgttgagggtccgactccctacttggacttctggcacagaaggggctgagtgactccttgagtagcagtggctcttcctagagtagccatgccgaggccggggcccccacccctcctccagggcaaccccttggtcctacagcaagaagccagaactgttggaatgaatggcagccctccctggagaggcagcctgtttactgaatacagaggatacgtttacaaactgaatacgcataataaataactgcacattctccatccaaaaaaaaaaaaaaaa

SEQ ID NO: 258 - protein, 264 aa, Homo sapiens
MLLLSLTLSLVLLGSSWGCGIPAIKPALSFSQRIVNGENAVLGSWPWQVSLQDSSGFHFCGGSLISQSWVVTAAHCNVSPGRHFVVLGEYDRSSNAEPLQVLSVSRAITHPSWNSTTMNNDVTLLKLASPAQYTTRISPVCLASSNEALTEGLTCVTTGWGRLSGVGNVTPAHLQQVALPLVTVNQCRQYWGSSITDSMICAGGAGASSCQGDSGGPLVCQKGNTWVLIGIVSWGTKNCNVRAPAVYTRVSKFSTWINQVIAYN

SEQ ID NO: 259 - DNA, 1207 bp, Homo sapiens
ggagtgcaggcttggaaagcaggagagctcagcctacgtctttaatcctcctgcccaccccttggattctgtctccactgggactcaagagaggaacctggggcccgctcctcccccctccaggccatgaggattctgcagttaatcctgcttgctctggcaacagggcttgtagggggagagaccaggatcatcaaggggttcgagtgcaagcctcactcccagccctggcaggcagccctgttcgagaagacgcggctactctgtggggcgacgctcatcgcccccagatggctcctgacagcagcccactgcctcaagccccgctacatagttcacctggggcagcacaacctccagaaggaggagggctgtgagcagacccggacagccactgagtccttcccccaccccggcttcaacaacagcctccccaacaaagaccaccgcaatgacatcatgctggtgaagatggcatcgccagtctccatcacctgggctgtgcgacccctcaccctctcctcacgctgtgtcactgctggcaccagctgcctcatttccggctggggcagcacgtccagcccccagttacgcctgcctcacaccttgcgatgcgccaacatcaccatcattgagcaccagaagtgtgagaacgcctaccccggcaacatcacagacaccatggtgtgtgccagcgtgcaggaagggggcaaggactcctgccagggtgactccgggggccctctggtctgtaaccagtctcttcaaggcattatctcctggggccaggatccgtgtgcgatcacccgaaagcctggtgtctacacgaaagtctgcaaatatgtggactggatccaggagacgatgaagaacaattagactggacccacccaccacagcccatcaccctccatttccacttggtgtttggttcctgttcactctgttaataagaaaccctaagccaagaccctctacgaacattctttgggcctcctggactacaggagatgctgtcacttaataatcaacctggggttcgaaatcagtgagacctggattcaaattctgccttgaaatattgtgactctgggaatgacaacacctggtttgttctctgttgtatccccagccccaaagacagctcctggccatatatcaaggtttcaataaatatttgctaaatgagtgaaaaaaaaaaaaaaaa

SEQ ID NO: 260 - protein, 250 aa, Homo sapiens
MRILQLILLALATGLVGGETRIIKGFECKPHSQPWQAALFEKTRLLCGATLIAPRWLLTAAHCLKPRYIVHLGQHNLQKEEGCEQTRTATESFPHPGFNNSLPNKDHRNDIMLVKMASPVSITWAVRPLTLSSRCVTAGTSCLISGWGSTSSPQLRLPHTLRCANITIIEHQKCENAYPGNITDTMVCASVQEGGKDSCQGDSGGPLVCNQSLQGIISWGQDPCAITRKPGVYTKVCKYVDWIQETMKNN

SEQ ID NO: 261 - DNA, 1289 bp, Homo sapiens
ctgccttgctccacacctggtcaggggagagaggggaggaaagccaagggaagggacctaactgaaaacaaacaagctgggagaagcaggaatctgcgctcgggttccgcagatgcagaggttgaggtggctgcgggactggaagtcatcgggcagaggtctcacagcagccaaggaacctggggcccgctcctcccccctccaggccatgaggattctgcagttaatcctgcttgctctggcaacagggcttgtagggggagagaccaggatcatcaaggggttcgagtgcaagcctcactcccagccctggcaggcagccctgttcgagaagacgcggctactctgtggggcgacgctcatcgcccccagatggctcctgacagcagcccactgcctcaagccccgctacatagttcacctggggcagcacaacctccagaaggaggagggctgtgagcagacccggacagccactgagtccttcccccaccccggcttcaacaacagcctccccaacaaagaccaccgcaatgacatcatgctggtgaagatggcatcgccagtctccatcacctgggctgtgcgacccctcaccctctcctcacgctgtgtcactgctggcaccagctgcctcatttccggctggggcagcacgtccagcccccagttacgcctgcctcacaccttgcgatgcgccaacatcaccatcattgagcaccagaagtgtgagaacgcctaccccggcaacatcacagacaccatggtgtgtgccagcgtgcaggaagggggcaaggactcctgccagggtgactccgggggccctctggtctgtaaccagtctcttcaaggcattatctcctggggccaggatccgtgtgcgatcacccgaaagcctggtgtctacacgaaagtctgcaaatatgtggactggatccaggagacgatgaagaacaattagactggacccacccaccacagcccatcaccctccatttccacttggtgtttggttcctgttcactctgttaataagaaaccctaagccaagaccctctacgaacattctttgggcctcctggactacaggagatgctgtcacttaataatcaacctggggttcgaaatcagtgagacctggattcaaattctgccttgaaatattgtgactctgggaatgacaacacctggtttgttctctgttgtatccccagccccaaagacagctcctggccatatatcaaggtttcaataaatatttgctaaatgagtgaaaaaaaaaaaaaaaa

SEQ ID NO: 262 - protein, 282 aa, Homo sapiens
MQRLRWLRDWKSSGRGLTAAKEPGARSSPLQAMRILQLILLALATGLVGGETRIIKGFECKPHSQPWQAALFEKTRLLCGATLIAPRWLLTAAHCLKPRYIVHLGQHNLQKEEGCEQTRTATESFPHPGFNNSLPNKDHRNDIMLVKMASPVSITWAVRPLTLSSRCVTAGTSCLISGWGSTSSPQLRLPHTLRCANITIIEHQKCENAYPGNITDTMVCASVQEGGKDSCQGDSGGPLVCNQSLQGIISWGQDPCAITRKPGVYTKVCKYVDWIQETMKNN

SEQ ID NO: 263 - DNA, 802 bp, Homo sapiens
accaccatgaatctacttctgatccttacctttgttgcagctgctgttgctgccccctttgatgatgatgacaagatcgttgggggctacatctgtgaggagaattctgtcccctaccaggtgtccttgaattctggctaccacttctgcggtggctccctcatcagcgaacagtgggtggtgtcagcaggtcactgctacaagtcccgcatccaggtgagactgggagagcacaacatcgaagtcctggaggggaatgaacagttcatcaatgcagccaagatcatccgccaccccaaatacaacagccggactctggacaatgacatcctgctgatcaagctctcctcacctgccgtcatcaattcccgcgtgtccgccatctctctgcccactgcccctccagctgctggcaccgagtccctcatctccggctggggcaacactctgagttctggtgccgactacccagacgagctgcagtgcctggatgctcctgtgctgagccaggctgagtgtgaagcctcctaccctggaaagattaccaacaacatgttctgtgtgggcttcctcgagggaggcaaggattcctgccagggtgattctggtggccctgtggtctccaatggagagctccaaggaattgtctcctggggctatggctgtgcccagaagaacaggcctggagtctacaccaaggtctacaactatgtggactggattaaggacaccatagctgccaacagctaaagcccctggtccctctgcagtctctataccaataaagtgaccctgctctcac

SEQ ID NO: 264 - protein, 247 aa, Homo sapiens
MNLLLILTFVAAAVAAPFDDDDKIVGGYICEENSVPYQVSLNSGYHFCGGSLISEQWVVSAGHCYKSRIQVRLGEHNIEVLEGNEQFINAAKIIRHPKYNSRTLDNDILLIKLSSPAVINSRVSAISLPTAPPAAGTESLISGWGNTLSSGADYPDELQCLDAPVLSQAECEASYPGKITNNMFCVGFLEGGKDSCQGDSGGPVVSNGELQGIVSWGYGCAQKNRPGVYTKVYNYVDWIKDTIAANS

SEQ ID NO: 265 - DNA, 1475 bp, Homo sapiens
acctgccgccatcttgctcaccagcctccaaaatgcggctggggctcctgagcgtggcgctgttgtttgtggggagctctcacttatactcagaccactactcgccctctggaaggcacaggctcggcccctcgccggaaccggcggctagttcccagcaggctgaggccgtccgcaagaggctccggcggcggagggagggaggggcgcatgcaaaggattgtggaacagcaccgcttaaggatgtgttgcaagggtctcggattatagggggcaccgaagcacaagctggcgcatggccgtgggtggtgagcctgcagattaaatatggccgtgttcttgttcatgtatgtgggggaaccctagtgagagagaggtgggtcctcacagctgcccactgcactaaagacgctagcgatcctttaatgtggacagctgtgattggaactaataatatacatggacgctatcctcataccaagaagataaaaattaaagcaatcattattcatccaaacttcattttggaatcttatgtaaatgatattgcactttttcacttaaaaaaagcagtgaggtataatgactatattcagcctatttgcctaccttttgatgttttccaaatcctggacggaaacacaaagtgttttataagtggctggggaagaacaaaagaagaaggtaacgctacaaatattttacaagatgcagaagtgcattatatttctcgagagatgtgtaattctgagaggagttatgggggaataattcctaacacttcattttgtgcaggtgatgaagatggagcttttgatacttgcaggggtgacagtgggggaccattaatgtgctacttaccagaatataaaagattttttgtaatgggaattaccagttacggacatggctgtggtcgaagaggttttcctggtgtctatattgggccatccttctaccaaaagtggctgacagagcatttcttccatgcaagcactcaaggcatacttactataaatattttacgtggccagatcctcatagctttatgttttgtcatcttactagcaacaacataaagaaattctgaaggctttcatatctttattttgcattgtgtccctttctatgttctatataatgaacatcatttattcttctagcaattaattgcctacattagagatttcatgtgaacattttatgggctataagtattgtgacagatatacaattgtaattttggcactgaatcacatgtctccttgaaatatcttgattattttataatcataattctgtatctggaatactcatagagtttgtacaaaatattcagttaaacatatatgtgtataaatgccaaataatagtttataattaaaatgaaagctgtcatttggttaaattaataaaaattctttcttagattttattctaaaaaaaaaaaaaaaaaaagaaaaaaaaaaaaaaaa

SEQ ID NO: 266 - protein, 348 aa, Homo sapiens
MRLGLLSVALLFVGSSHLYSDHYSPSGRHRLGPSPEPAASSQQAEAVRKRLRRRREGGAHAKDCGTAPLKDVLQGSRIIGGTEAQAGAWPWVVSLQIKYGRVLVHVCGGTLVRERWVLTAAHCTKDASDPLMWTAVIGTNNIHGRYPHTKKIKIKAIIIHPNFILESYVNDIALFHLKKAVRYNDYIQPICLPFDVFQILDGNTKCFISGWGRTKEEGNATNILQDAEVHYISREMCNSERSYGGIIPNTSFCAGDEDGAFDTCRGDSGGPLMCYLPEYKRFFVMGITSYGHGCGRRGFPGVYIGPSFYQKWLTEHFFHASTQGILTINILRGQILIALCFVILLATT

SEQ ID NO: 267 - DNA, 1164 bp, Homo sapiens
atgattgccgttctcattgtgttgtccctgacagtggtggcagtgaccataggtctcctggttcacttcctagtatttgaccaaaaaaaggagtactatcatggctcctttaaaattttagatccacaaatcaataacaatttcggacaaagcaacacatatcaacttaaggacttacgagagacgaccgaaaatttggtggatgagatatttatagattcagcctggaagaaaaattatatcaagaaccaagtagtcagactgactccagaggaagatggtgtgaaagtagatgtcattatggtgttccagttcccctctactgaacaaagggcagtaagagagaagaaaatccaaagcatcttaaatcagaagataaggaatttaagagccttgccaataaatgcctcatcagttcaagttaatggttgtggtaaacgagttgttccattaaacgtcaacagaatagcatctggagtcattgcacccaaggcggcctggccttggcaagcttcccttcagtatgataacatccatcagtgtggggccaccttgattagtaacacatggcttgtcactgcagcacactgcttccagaagtataaaaatccacatcaatggactgttagttttggaacaaaaatcaaccctcccttaatgaaaagaaatgtcagaagatttattatccatgagaagtaccgctctgcagcaagagagtacgacattgctgttgtgcaggtctcttccagagtcaccttttcggatgacatacgccagatttgtttgccagaagcctctgcatccttccaaccaaatttgactgtccacatcacaggatttggagcactttactatggtggggaatcccaaaatgatctccgagaagccagagtgaaaatcataagtgatgatgtctgcaagcaaccacaggtgtatggcaatgatataaaacctggaatgttctgtgccggatatatggaaggaatttatgatgcctgcaggggtgattctgggggacctttagtcacaagggatctgaaagatacgtggtatctcattggaattgtaagctggggagataactgtggtcaaaaggacaagcctggagtctacacacaagtgacttattaccgaaactggattgcttcaaaaacaggcatctaa

SEQ ID NO: 268 - protein, 387 aa, Homo sapiens
MIAVLIVLSLTVVAVTIGLLVHFLVFDQKKEYYHGSFKILDPQINNNFGQSNTYQLKDLRETTENLVDEIFIDSAWKKNYIKNQVVRLTPEEDGVKVDVIMVFQFPSTEQRAVREKKIQSILNQKIRNLRALPINASSVQVNGCGKRVVPLNVNRIASGVIAPKAAWPWQASLQYDNIHQCGATLISNTWLVTAAHCFQKYKNPHQWTVSFGTKINPPLMKRNVRRFIIHEKYRSAAREYDIAVVQVSSRVTFSDDIRQICLPEASASFQPNLTVHITGFGALYYGGESQNDLREARVKIISDDVCKQPQVYGNDIKPGMFCAGYMEGIYDACRGDSGGPLVTRDLKDTWYLIGIVSWGDNCGQKDKPGVYTQVTYYRNWIASKTGI

SEQ ID NO: 269 - protein, 431 aa, Rattus norvegicus
MARGQPRRSEEPWTALRNRTECKTKIKLTKCGKITLGILTAVIAAVVIGLIAYFAACGKTPFYYHVSFKVNNIDYDSKFAKPYSQEYMDLNKRIVSLMNETFHESKLRKQYVKAHTVQVSKAKGKVVIHGVLKFKSCYKNNVEKFWDSVETILYQKLKSQTRLLIDSSSFKFSDIAMPIAEDLLNTCCGRRTITPGGHKVAGGQDAEEGEWPWQASLQQNNVHRCGATLISNSWLITAAHCFVRSANPKDWKVSFGFLLSKPQAQRAVKSIVIHENYSYPAHNNDIAVVRLSSPVLYENNIRRACLPEATQKFPPNSDVVVTGWGTLKSDGDSPNILQKGRVKIIDNKTCNSGKAYGGVITPGMLCAGFLEGRVDACQGDSGGPLVSEDSKGIWFLAGIVSWGDECALPNKPGVYTRVTHYRDWISSKTGL

SEQ ID NO: 270 - protein, 247 aa, Homo sapiens
MNPLLILAFVGAAVAVPFDDDDKIVGGYTCEENSVPYQVSLNSGSHFCGGSLISEQWVVSAGHCYKPHIQVRLGEHNIEVLEGNEQFINAAKIIRHPKYNRITLNNDIMLIKLSTPAVINAHVSTISLPTAPPAAGTECLISGWGNTLSSGADYPDELQCLDAPVLTQAKCKASYPLKITSKMFCVGFLEGGKDSCQGDSGGPVVCNGQLQGIVSWGYGCAQKRRPGVYTKVYNYVDWIKDTIAANS

SEQ ID NO: 271 - DNA, 1099 bp, Homo sapiens
gcacagcccagggccatgctcctgttctcagtgttgctgctcctgtccctggtcacgggaactcagctcggtccacggactcctctcccagaggctggagtggctatcctaggcagggctaggggagcccaccgccctcagccccgtcatccccccagcccagtcagtgaatgtggtgacagatctattttcgagggaagaactcggtattccagaatcacaggggggatggaggcggaggtgggtgagtttccgtggcaggtgagtattcaggcaagaagtgaacctttctgtggcggctccatcctcaacaagtggtggattctcactgcggctcactgcttatattccgaggagctgtttccagaagaactgagtgtcgtgctggggaccaacgacttaactagcccatccatggaaataaaggaggtcgccagcatcattcttcacaaagactttaagagagccaacatggacaatgacattgccttgctgctgctggcttcgcccatcaagctcgatgacctgaaggtgcccatctgcctccccacgcagcccggccctgccacatggcgcgaatgctgggtggcaggttggggccagaccaatgctgctgacaaaaactctgtgaaaacggatctgatgaaagtgccaatggtcatcatggactgggaggagtgttcaaagatgtttccaaaacttaccaaaaatatgctgtgtgccggatacaagaatgagagctatgatgcctgcaagggtgacagtggggggcctctggtctgcaccccagagcctggtgagaagtggtaccaggtgggcatcatcagctggggaaagagctgtggagagaagaacaccccagggatatacacctcgttggtgaactacaacctctggatcgagaaagtgacccagctagagggcaggcccttcaatgcagagaaaaggaggacttctgtcaaacagaaacctatgggctccccagtctcgggagtcccagagccaggcagccccagatcctggctcctgctctgtcccctgtcccatgtgttgttcagagctattttgtactgataataaaatagaggctattctttca

SEQ ID NO: 272 - protein, 352 aa, Homo sapiens
MLLFSVLLLLSLVTGTQLGPRTPLPEAGVAILGRARGAHRPQPRHPPSPVSECGDRSIFEGRTRYSRITGGMEAEVGEFPWQVSIQARSEPFCGGSILNKWWILTAAHCLYSEELFPEELSVVLGTNDLTSPSMEIKEVASIILHKDFKRANMDNDIALLLLASPIKLDDLKVPICLPTQPGPATWRECWVAGWGQTNAADKNSVKTDLMKVPMVIMDWEECSKMFPKLTKNMLCAGYKNESYDACKGDSGGPLVCTPEPGEKWYQVGIISWGKSCGEKNTPGIYTSLVNYNLWIEKVTQLEGRPFNAEKRRTSVKQKPMGSPVSGVPEPGSPRSWLLLCPLSHVLFRAILY

SEQ ID NO: 273 - DNA, 1927 bp, Homo sapiens
tgccagcccaagtcggaacttggatcacatcagatcctctcgagctccagcaggagaggcccttcctcgcctggcagcccctgagcggctcagcagggcaccatggcaagatcccttctcctgcccctgcagatcttactgctatccttagccttggaaactgcaggagaagaagcccagggtgacaagattattgatggcgccccatgtgcaagaggctcccacccatggcaggtggccctgctcagtggcaatcagctccactgcggaggcgtcctggtcaatgagcgctgggtgctcactgccgcccactgcaagatgaatgagtacaccgtgcacctgggcagtgatacgctgggcgacaggagagctcagaggatcaaggcctcgaagtcattccgccaccccggctactccacacagacccatgttaatgacctcatgctcgtgaagctcaatagccaggccaggctgtcatccatggtgaagaaagtcaggctgccctcccgctgcgaaccccctggaaccacctgtactgtctccggctggggcactaccacgagcccagatgtgacctttccctctgacctcatgtgcgtggatgtcaagctcatctccccccaggactgcacgaaggtttacaaggacttactggaaaattccatgctgtgcgctggcatccccgactccaagaaaaacgcctgcaatggtgactcagggggaccgttggtgtgcagaggtaccctgcaaggtctggtgtcctggggaactttcccttgcggccaacccaatgacccaggagtctacactcaagtgtgcaagttcaccaagtggataaatgacaccatgaaaaagcatcgctaacgccacactgagttaattaactgtgtgcttccaacagaaaatgcacaggagtgaggacgccgatgacctatgaagtcaaatttgactttacctttcctcaaagatatatttaaaccaacctcatgccctgttgataaaccaatcaaattggtaaagacctaaaaccaaaacaaataaagaaacacaaaaccctcagtgctggagaagagtcagtgagaccagcactctcaaacactggaactggacgttcgtacagtctttacggaagacacttggtcaacgtacaccgagacccttattcaccacctttgacccagtaactctaatcttaggaagaacctactgaaacaaaaaaaatccaaaatgtagaacaagacttgaatttaccatgatattatttatcacagaaatgaagtgaaaccatcaaacatgttccaaaagtaccagatggcttaaataatagtctggcttggcacaacgatgttttttttctttgagacagagtctctgttgcttgggctgcaatgcagtgatgcaatcttggctcactgcaacctccgcctcctgggttcaagtgattctcgtgcttcagcctcccaagtacctgggactacaggtgtgcaccaccacaccaggctaattttttgtgtatttttactagagacagggtttcaccatgttggccagcgtggtcttgaacgcctgacctcagatgatccacccaccttggcctcccaaagtgctgggattacaggcatgagccaccacggccagcccacaatgatattacaaacctattaaaaatgatacttagacagaattgtcagtattattcaagaacatttaggctataggatgttaaatgacaaaaggaaggacaaaaatatatatgtatgtgaccctacccataaaaaatgaaatattcacagaatcagatctgaaaacacatgtcccagactgcatactggggtcgtcatgaggtgtctccttccttctgtgtacttttccttgaatgtgcacttttataacatgaaaaataaaggtggggaaaaaagtctgaaga

SEQ ID NO: 274 - protein, 253 aa, Homo sapiens
MARSLLLPLQILLLSLALETAGEEAQGDKIIDGAPCARGSHPWQVALLSGNQLHCGGVLVNERWVLTAAHCKMNEYTVHLGSDTLGDRRAQRIKASKSFRHPGYSTQTHVNDLMLVKLNSQARLSSMVKKVRLPSRCEPPGTTCTVSGWGTTTSPDVTFPSDLMCVDVKLISPQDCTKVYKDLLENSMLCAGIPDSKKNACNGDSGGPLVCRGTLQGLVSWGTFPCGQPNDPGVYTQVCKFTKWINDTMKKHR

SEQ ID NO: 275 - DNA, 1927 bp, Homo sapiens
ggagagggtgatgctggctccaagcctgactctgctctcgagagctccagcaggagaggcccttcctcgcctggcagcccctgagcggctcagcagggcaccatggcaagatcccttctcctgcccctgcagatcttactgctatccttagccttggaaactgcaggagaagaagcccagggtgacaagattattgatggcgccccatgtgcaagaggctcccacccatggcaggtggccctgctcagtggcaatcagctccactgcggaggcgtcctggtcaatgagcgctgggtgctcactgccgcccactgcaagatgaatgagtacaccgtgcacctgggcagtgatacgctgggcgacaggagagctcagaggatcaaggcctcgaagtcattccgccaccccggctactccacacagacccatgttaatgacctcatgctcgtgaagctcaatagccaggccaggctgtcatccatggtgaagaaagtcaggctgccctcccgctgcgaaccccctggaaccacctgtactgtctccggctggggcactaccacgagcccagatgtgacctttccctctgacctcatgtgcgtggatgtcaagctcatctccccccaggactgcacgaaggtttacaaggacttactggaaaattccatgctgtgcgctggcatccccgactccaagaaaaacgcctgcaatggtgactcagggggaccgttggtgtgcagaggtaccctgcaaggtctggtgtcctggggaactttcccttgcggccaacccaatgacccaggagtctacactcaagtgtgcaagttcaccaagtggataaatgacaccatgaaaaagcatcgctaacgccacactgagttaattaactgtgtgcttccaacagaaaatgcacaggagtgaggacgccgatgacctatgaagtcaaatttgactttacctttcctcaaagatatatttaaaccaacctcatgccctgttgataaaccaatcaaattggtaaagacctaaaaccaaaacaaataaagaaacacaaaaccctcagtgctggagaagagtcagtgagaccagcactctcaaacactggaactggacgttcgtacagtctttacggaagacacttggtcaacgtacaccgagacccttattcaccacctttgacccagtaactctaatcttaggaagaacctactgaaacaaaaaaaatccaaaatgtagaacaagacttgaatttaccatgatattatttatcacagaaatgaagtgaaaccatcaaacatgttccaaaagtaccagatggcttaaataatagtctggcttggcacaacgatgttttttttctttgagacagagtctctgttgcttgggctgcaatgcagtgatgcaatcttggctcactgcaacctccgcctcctgggttcaagtgattctcgtgcttcagcctcccaagtacctgggactacaggtgtgcaccaccacaccaggctaattttttgtgtatttttactagagacagggtttcaccatgttggccagcgtggtcttgaacgcctgacctcagatgatccacccaccttggcctcccaaagtgctgggattacaggcatgagccaccacggccagcccacaatgatattacaaacctattaaaaatgatacttagacagaattgtcagtattattcaagaacatttaggctataggatgttaaatgacaaaaggaaggacaaaaatatatatgtatgtgaccctacccataaaaaatgaaatattcacagaatcagatctgaaaacacatgtcccagactgcatactggggtcgtcatgaggtgtctccttccttctgtgtacttttccttgaatgtgcacttttataacatgaaaaataaaggtggggaaaaaagtctgaaga

SEQ ID NO: 276 - protein, 253 aa, Homo sapiens; identical to SEQ ID NO: 274

SEQ ID NO: 277 - DNA, 2800 bp, Homo sapiens
atttgagtgggaatctcaaagcagttgagtaggcagaaaaaagaacctcttcattaaggattaaaatgtataggccagcacgtgtaacttcgacttcaagatttctgaatccatatgtagtatgtttcattgtcgtcgcaggggtagtgatcctggcagtcaccatagctctacttgtttactttttagcttttgatcaaaaatcttacttttataggagcagttttcaactcctaaatgttgaatataatagtcagttaaattcaccagctacacaggaatacaggactttgagtggaagaattgaatctctgattactaaaacattcaaagaatcaaatttaagaaatcagttcatcagagctcatgttgccaaactgaggcaagatggtagtggtgtgagagcggatgttgtcatgaaatttcaattcactagaaataacaatggagcatcaatgaaaagcagaattgagtctgttttacgacaaatgctgaataactctggaaacctggaaataaacccttcaactgagataacatcacttactgaccaggctgcagcaaattggcttattaatgaatgtggggccggtccagacctaataacattgtctgagcagagaatccttggaggcactgaggctgaggagggaagctggccgtggcaagtcagtctgcggctcaataatgcccaccactgtggaggcagcctgatcaataacatgtggatcctgacagcagctcactgcttcagaagcaactctaatcctcgtgactggattgccacgtctggtatttccacaacatttcctaaactaagaatgagagtaagaaatattttaattcataacaattataaatctgcaactcatgaaaatgacattgcacttgtgagacttgagaacagtgtcacctttaccaaagatatccatagtgtgtgtctcccagctgctacccagaatattccacctggctctactgcttatgtaacaggatggggcgctcaagaatatgctggccacacagttccagagctaaggcaaggacaggtcagaataataagtaatgatgtatgtaatgcaccacatagttataatggagccatcttgtctggaatgctgtgtgctggagtacctcaaggtggagtggacgcatgtcagggtgactctggtggcccactagtacaagaagactcacggcggctttggtttattgtggggatagtaagctggggagatcagtgtggcctgccggataagccaggagtgtatactcgagtgacagcctaccttgactggattaggcaacaaactgggatctagtgcaacaagtgcatccctgttgcaaagtctgtatgcaggtgtgcctgtcttaaattccaaagctttacatttcaactgaaaaagaaactagaaatgtcctaatttaacatcttgttacataaatatggtttaacaaacactgtttaacctttctttattattaaaggttttctattttctccagagaactatatgaatgttgcatagtactgtggctgtgtaacagaagaaacacactaaactaattacaaagttaacaatttcattacagttgtgctaaatgcccgtagtgagaagaacaggaaccttgagcatgtatagtagaggaacctgcacaggtctgatgggtcagaggggtcttctctgggtttcactgaggatgagaagtaagcaaactgtggaaacatgcaaaggaaaaagtgatagaataatattcaagacaaaaagaacagtatgaggcaagagaaataatatgtatttaaaatttttggttactcaatatcttatacttagtatgagtcctaaaattaaaaatgtgaaactgttgtactatacgtataacctaaccttaattattctgtaagaacatgcttccataggaaatagtggataattttcagctatttaaggcaaaagctaaaatagttcactcctcaactgagacccaaagaattatagatatttttcatgatgacccatgaaaaatatcactcatctacataaaggagagactatatctattttatagagaagctaagaaatatacctacacaaacttgtcaggtgctttacaactacatagtactttttaacaacaaaataataattttaagaatgaaaaatttaatcatcgggaagaacgtcccactacagacttcctatcactggcagttatatttttgagcgtaaaagggtcgtcaaacgctaaatctaagtaacgaattgaaagtttaaagagggggaagagttggtttgcaaaggaaaagtttaaatagcttaatatcaatagaatgatcctgaagacagaaaaaactttgtcactcttcctctctcattttctttctctctctctccccttctcatacacatgcctcccccaccaaagaatataatgtaaattaaatccactaaaatgtaatggcatgaaaatctctgtagtctgaatcactaatattcctgagtttttatgagctcctagtacagctaaagtttgcctatgcatgatcatctatgcgtcagagcttcctccttctacaagctaactccctgcatctgggcatcaggactgctccatacatttgctgaaaacttcttgtatttcctgatgtaaaattgtgcaaacacctacaataaagccatctacttttagggaaagggagttgaaaatgcaaccaactcttggcgaactgtacaaacaaatctttgctatactttatttcaaataaattctttttaaaataaaaaaaaaaaaaaaaaaa

SEQ ID NO: 278 - protein, 418 aa, Homo sapiens
MYRPARVTSTSRFLNPYVVCFIVVAGVVILAVTIALLVYFLAFDQKSYFYRSSFQLLNVEYNSQLNSPATQEYRTLSGRIESLITKTFKESNLRNQFIRAHVAKLRQDGSGVRADVVMKFQFTRNNNGASMKSRIESVLRQMLNNSGNLEINPSTEITSLTDQAAANWLINECGAGPDLITLSEQRILGGTEAEEGSWPWQVSLRLNNAHHCGGSLINNMWILTAAHCFRSNSNPRDWIATSGISTTFPKLRMRVRNILIHNNYKSATHENDIALVRLENSVTFTKDIHSVCLPAATQNIPPGSTAYVTGWGAQEYAGHTVPELRQGQVRIISNDVCNAPHSYNGAILSGMLCAGVPQGGVDACQGDSGGPLVQEDSRRLWFIVGIVSWGDQCGLPDKPGVYTRVTAYLDWIRQQTGI

SEQ ID NO: 279 - DNA, 1258 bp, Homo sapiens
tcaggccccgcccgccctgccctcccctcccgatcccggagccatgtggcccctggccctagtgatcgcctccctgaccttggccttgtcaggaggtgtctcccaggagtcttccaaggttctcaacaccaatgggaccagtgggtttctcccaggtggctacacctgcttcccccactctcagccctggcaggctgccctactagtgcaagggcggctactctgtgggggagtcctggtccaccccaaatgggtcctcactgccgcacactgtctaaaggaggggctcaaagtttacctaggcaagcacgccctagggcgtgtggaagctggtgagcaggtgagggaagttgtccactctatcccccaccctgaataccggagaagccccacccacctgaaccacgaccatgacatcatgcttctggagctgcagtccccggtccagctcacaggctacatccaaaccctgcccctttcccacaacaaccgcctaacccctggcaccacctgtcgggtgtctggctggggcaccaccaccagcccccaggtgaattaccccaaaactctacaatgtgccaacatccaacttcgctcagatgaggagtgtcgtcaagtctacccaggaaagatcactgacaacatgttgtgtgccggcacaaaagagggtggcaaagactcctgtgagggtgactctgggggccccctggtctgtaacagaacactgtatggcatcgtctcctggggagacttcccatgtgggcaacctgaccggcctggtgtctacacccgtgtctcaagatacgtcctgtggatccgtgaaacaatccgaaaatatgaaacccagcagcaaaaatggttgaagggcccacaataaaagttgagaaatgtaccggcttccatcctgtcaccatgacttcctcacatggtctgcttagcccttctctgctccttattcccagtgttccatttgaaccagtgatccatgtcctgaaaaatgctcaatctcagctaacattccatgtttcagaagcattcaggcactgccaggcttgcagtctcccagatgttgcatccctgaaacatctcaacaacctgaatgtcccaacccagacaatggcccaggtctctcaacttcatcagtgtggcttctatgagcccagatcaccacctgaacgttctgtctgtggcacattcttaaatatttccatcagcccatctcaacaatatatgtcctataaatggaccatccttgaca

SEQ ID NO: 280 - protein, 277 aa, Homo sapiens
MWPLALVIASLTLALSGGVSQESSKVLNTNGTSGFLPGGYTCFPHSQPWQAALLVQGRLLCGGVLVHPKWVLTAAHCLKEGLKVYLGKHALGRVEAGEQVREVVHSIPHPEYRRSPTHLNHDHDIMLLELQSPVQLTGYIQTLPLSHNNRLTPGTTCRVSGWGTTTSPQVNYPKTLQCANIQLRSDEECRQVYPGKITDNMLCAGTKEGGKDSCEGDSGGPLVCNRTLYGIVSWGDFPCGQPDRPGVYTRVSRYVLWIRETIRKYETQQQKWLKGPQ

SEQ ID NO: 281 - DNA, 1438 bp, Homo sapiens
catggaggaggaaggagatggcatggcttaccataaagaagcactggacgccgggtgcacgttccaggatccaggtgcccaggggtcatgaagctgggactcctctgtgctctgctctctctgctggcagggcatggctgggcagacacccgtgccatcggggccgaggaatgtcgccccaactcccagccttggcaggccggcctcttccaccttactcggctcttctgtggggcgaccctcatcagtgaccgctggctgctcacagctgcccactgccgcaagccgtatctgtgggtccgccttggagagcaccacctctggaaatgggagggtccggagcagctgttccgggttacggacttcttcccccaccctggcttcaacaaggacctcagcgccaatgaccacaatgatgacatcatgctgatccgcctgcccaggcaggcacgtctgagtcctgctgtgcagcccctcaacctcagccagacctgtgtctccccaggcatgcagtgtctcatctcaggctggggggccgtgtccagccccaaggcgctgtttccagtcacactgcagtgtgccaacatcagcatcctggagaacaaactctgtcactgggcataccctggacacatctcggacagcatgctctgtgcgggcctgtgggaggggggccgaggttcctgccagggtgactctgggggccccctggtttgcaatggaaccttggcaggcgtggtgtctgggggtgctgagccctgctccagaccccggcgccccgcagtctacaccagcgtatgccactaccttgactggatccaagaaatcatggagaactgagcccgcgcgccacgggggcaccttggaagaccaagagaggccgaagggcacggggtagggggttctcgtagggtcccagcctcaatggttcccgccctggacctccagctgccctgactcccctctggacactaagactccgcccctgaggctccgccccctcacgaggtcaagcaagacacagtcgcgccccctcggaacggagcagggacacgcccttcagagcccgtctctatgacgtcaccgacagccatcacctccttcttggaacagcacagcctgtggctccgccccaaggaaccacttacacaaaatagctccgcccctcggaactttgcccagtgggacttcccctcgggactccaccccttgtggccccgcctccttcaccagagatctcgcccctcgtgatgtcaggggcgcagtagctccgcccacgtggagctcgggcggtgtagagctcagccccttgtggccccgtcctgggcgtgtgctgggtttgaatcctggcggagacctggggggaaattgagggagggtctggatacctttagagccaatgcaacggatgatttttcagtaaacgcgggaaacctca

SEQ ID NO: 282 - protein, 250 aa, Homo sapiens
MKLGLLCALLSLLAGHGWADTRAIGAEECRPNSQPWQAGLFHLTRLFCGATLISDRWLLTAAHCRKPYLWVRLGEHHLWKWEGPEQLFRVTDFFPHPGFNKDLSANDHNDDIMLIRLPRQARLSPAVQPLNLSQTCVSPGMQCLISGWGAVSSPKALFPVTLQCANISILENKLCHWAYPGHISDSMLCAGLWEGGRGSCQGDSGGPLVCNGTLAGVVSGGAEPCSRPRRPAVYTSVCHYLDWIQEIMEN

SEQ ID NO: 283 - DNA, 3212 bp, Homo sapiens
cttgagccagacccagtccagctctggtgcctgccctctggtgcgagctgacctgagatgcacttccctcctctgtgagctgtctcggcacccacttgcagtcactgccgcctgatgttgttactcttccactccaaaaggatgcccgtggccgaggccccccaggtggctggcgggcagggggacggaggtgatggcgaggaagcggagccggaggggatgttcaaggcctgtgaggactccaagagaaaagcccggggctacctccgcctggtgcccctgtttgtgctgctggccctgctcgtgctggcttcggcgggggtgctactctggtatttcctagggtacaaggcggaggtgatggtcagccaggtgtactcaggcagtctgcgtgtactcaatcgccacttctcccaggatcttacccgccgggaatctagtgccttccgcagtgaaaccgccaaagcccagaagatgctcaaggagctcatcaccagcacccgcctgggaacttactacaactccagctccgtctattcctttggggagggacccctcacctgcttcttctggttcattctccaaatccccgagcaccgccggctgatgctgagccccgaggtggtgcaggcactgctggtggaggagctgctgtccacagtcaacagctcggctgccgtcccctacagggccgagtacgaagtggaccccgagggcctagtgatcctggaagccagtgtgaaagacatagctgcattgaattccacgctgggttgttaccgctacagctacgtgggccagggccaggtcctccggctgaaggggcctgaccacctggcctccagctgcctgtggcacctgcagggccccaaggacctcatgctcaaactccggctggagtggacgctggcagagtgccgggaccgactggccatgtatgacgtggccgggcccctggagaagaggctcatcacctcggtgtacggctgcagccgccaggagcccgtggtggaggttctggcgtcgggggccatcatggcggtcgtctggaagaagggcctgcacagctactacgaccccttcgtgctctccgtgcagccggtggtcttccaggcctgtgaagtgaacctgacgctggacaacaggctcgactcccagggcgtcctcagcaccccgtacttccccagctactactcgccccaaacccactgctcctggcacctcacggtgccctctctggactacggcttggccctctggtttgatgcctatgcactgaggaggcagaagtatgatttgccgtgcacccagggccagtggacgatccagaacaggaggctgtgtggcttgcgcatcctgcagccctacgccgagaggatccccgtggtggccacggccgggatcaccatcaacttcacctcccagatctccctcaccgggcccggtgtgcgggtgcactatggcttgtacaaccagtcggacccctgccctggagagttcctctgttctgtgaatggactctgtgtccctgcctgtgatggggtcaaggactgccccaacggcctggatgagagaaactgcgtttgcagagccacattccagtgcaaagaggacagcacatgcatctcactgcccaaggtctgtgatgggcagcctgattgtctcaacggcagcgacgaagagcagtgccaggaaggggtgccatgtgggacattcaccttccagtgtgaggaccggagctgcgtgaagaagcccaacccgcagtgtgatgggcggcccgactgcagggacggctcggatgaggagcactgtgactgtggcctccagggcccctccagccgcattgttggtggagctgtgtcctccgagggtgagtggccatggcaggccagcctccaggttcggggtcgacacatctgtgggggggccctcatcgctgaccgctgggtgataacagctgcccactgcttccaggaggacagcatggcctccacggtgctgtggaccgtgttcctgggcaaggtgtggcagaactcgcgctggcctggagaggtgtccttcaaggtgagccgcctgctcctgcacccgtaccacgaagaggacagccatgactacgacgtggcgctgctgcagctcgaccacccggtggtgcgctcggccgccgtgcgccccgtctgcctgcccgcgcgctcccacttcttcgagcccggcctgcactgctggattacgggctggggcgccttgcgcgagggcggccccatcagcaacgctctgcagaaagtggatgtgcagttgatcccacaggacctgtgcagcgaggtctatcgctaccaggtgacgccacgcatgctgtgtgccggctaccgcaagggcaagaaggatgcctgtcagggtgactcaggtggtccgctggtgtgcaaggcactcagtggccgctggttcctggcggggctggtcagctggggcctgggctgtggccggcctaactacttcggcgtctacacccgcatcacaggtgtgatcagctggatccagcaagtggtgacctgaggaactgcccccctgcaaagcagggcccacctcctggactcagagagcccagggcaactgccaagcagggggacaagtattctggcggggggtgggggagagagcaggccctgtggtggcaggaggtggcatcttgtctcgtccctgatgtctgctccagtgatggcaggaggatggagaagtgccagcagctgggggtcaagacgtcccctgaggacccaggcccacacccagcccttctgcctcccaattctctctcctccgtccccttcctccactgctgcctaatgcaaggcagtggctcagcagcaagaatgctggttctacatcccgaggagtgtctgaggtgcgccccactctgtacagaggctgtttgggcagccttgcctccagagagcagattccagcttcggaagcccctggtctaacttgggatctgggaatggaaggtgctcccatcggaggggaccctcagagccctggagactgccaggtgggcctgctgccactgtaagccaaaaggtggggaagtcctgactccagggtccttgccccacccctgcctgccacctgggccctcacagcccagaccctcactgggaggtgagctcagctgccctttggaataaagctgcctgatcaaaaaaaaaaaaaaaaaaaaa

SEQ ID NO: 284 - protein, 811 aa, Homo sapiens
MLLLFHSKRMPVAEAPQVAGGQGDGGDGEEAEPEGMFKACEDSKRKARGYLRLVPLFVLLALLVLASAGVLLWYFLGYKAEVMVSQVYSGSLRVLNRHFSQDLTRRESSAFRSETAKAQKMLKELITSTRLGTYYNSSSVYSFGEGPLTCFFWFILQIPEHRRLMLSPEVVQALLVEELLSTVNSSAAVPYRAEYEVDPEGLVILEASVKDIAALNSTLGCYRYSYVGQGQVLRLKGPDHLASSCLWHLQGPKDLMLKLRLEWTLAECRDRLAMYDVAGPLEKRLITSVYGCSRQEPVVEVLASGAIMAVVWKKGLHSYYDPFVLSVQPVVFQACEVNLTLDNRLDSQGVLSTPYFPSYYSPQTHCSWHLTVPSLDYGLALWFDAYALRRQKYDLPCTQGQWTIQNRRLCGLRILQPYAERIPVVATAGITINFTSQISLTGPGVRVHYGLYNQSDPCPGEFLCSVNGLCVPACDGVKDCPNGLDERNCVCRATFQCKEDSTCISLPKVCDGQPDCLNGSDEEQCQEGVPCGTFTFQCEDRSCVKKPNPQCDGRPDCRDGSDEEHCDCGLQGPSSRIVGGAVSSEGEWPWQASLQVRGRHICGGALIADRWVITAAHCFQEDSMASTVLWTVFLGKVWQNSRWPGEVSFKVSRLLLHPYHEEDSHDYDVALLQLDHPVVRSAAVRPVCLPARSHFFEPGLHCWITGWGALREGGPISNALQKVDVQLIPQDLCSEVYRYQVTPRMLCAGYRKGKKDACQGDSGGPLVCKALSGRWFLAGLVSWGLGCGRPNYFGVYTRITGVISWIQQVVT

SEQ ID NO: 285 - DNA, 3750 bp, Homo sapiens
gcgctgctcgccagcttgctcgcactcggctgtgcggcggggcaggcatgggagccgcgcgctctctcccggcgcccacacctgtctgagcggcgcagcgagccgcggcccgggcgggctgctcggcgcggaacagtgctcggcatggcagggattccagggctcctcttccttctcttctttctgctctgtgctgttgggcaagtgagcccttacagtgccccctggaaacccacttggcctgcataccgcctccctgtcgtcttgccccagtctaccctcaatttagccaagccagactttggagccgaagccaaattagaagtatcttcttcatgtggaccccagtgtcataagggaactccactgcccacttacgaagaggccaagcaatatctgtcttatgaaacgctctatgccaatggcagccgcacagagacgcaggtgggcatctacatcctcagcagtagtggagatggggcccaacaccgagactcagggtcttcaggaaagtctcgaaggaagcggcagatttatggctatgacagcaggttcagcatttttgggaaggacttcctgctcaactaccctttctcaacatcagtgaagttatccacgggctgcaccggcaccctggtggcagagaagcatgtcctcacagctgcccactgcatacacgatggaaaaacctatgtgaaaggaacccagaagcttcgagtgggcttcctaaagcccaagtttaaagatggtggtcgaggggccaacgactccacttcagccatgcccgagcagatgaaatttcagtggatccgggtgaaacgcacccatgtgcccaagggttggatcaagggcaatgccaatgacatcggcatggattatgattatgccctcctggaactcaaaaagccccacaagagaaaatttatgaagattggggtgagccctcctgctaagcagctgccagggggcagaattcacttctctggttatgacaatgaccgaccaggcaatttggtgtatcgcttctgtgacgtcaaagacgagacctatgacttgctctaccagcaatgcgatgcccagccaggggccagcgggtctggggtctatgtgaggatgtggaagagacagcagcagaagtgggagcgaaaaattattggcattttttcagggcaccagtgggtggacatgaatggttccccacaggatttcaacgtggctgtcagaatcactcctctcaaatatgcccagatttgctattggattaaaggaaactacctggattgtagggaggggtgacacagtgttccctcctggcagcaattaagggtcttcatgttcttattttaggagaggccaaattgttttttgtcattggcgtgcacacgtgtgtgtgtgtgtgtgtgtgtgtgtaaggtgtcttataatcttttacctatttcttacaattgcaagatgactggctttactatttgaaaactggtttgtgtatcatatcatatatcatttaagcagtttgaaggcatacttttgcatagaaataaaaaaaatactgatttggggcaatgaggaatatttgacaattaagttaatcttcacgtttttgcaaactttgatttttatttcatctgaacttgtttcaaagatttatattaaatatttggcatacaagagatatgaattcttatatgtgtgcatgtgtgttttcttctgagattcatcttggtggtgggtttttttgtttttttaattcagtgcctgatctttaatgcttccataaggcagtgttcccatttaggaactttgacagcatttgttaggcagaatattttggatttggaggcatttgcatggtagtctttgaacagtaaaatgatgtgttgactatactgatacacatattaaactataccttatagtaaaccagtatcccaagctgcttttagttccaaaaatagtttcttttccaaaggttgttgctctactttgtaggaagtctttgcatatggccctcccaactttaaagtcataccagagtggccaagagtgtttatcccaacccttccatttaacaggatttcactcacatttctggaactagctatttttcagaagacaataatcagggcttaattagaacaggctgtatttcctcccagcaaacagttgtggccacactaaaaacaatcatagcattttacccctggattatagcacatctcatgttttatcatttggatggagtaatttaaaatgaattaaattccagagaacaatggaagcattgcctggcagatgtcacaacagaataaccacttgtttggagcctggcacagtcctccagcctgatcaaaaattattctgcatagttttcagtgtgctttctgggagctatgtacttcttcaatttggaaacttttctctctcatttatagtgaaaatacttggaagttactttaagaaaaccagtgtggcctttttccctctagctttaaaagggccgcttttgctggaatgctctaggttatagataaacaattaggtataatagcaaaaatgaaaattggaagaatgcaaaatggatcagaatcatgccttccaataaaggcctttacacatgttttatcaatatgattatcaaatcacagcatatacagaaaagacttggacttattgtatgtttttattttatggctctcggcctaagcacttctttctaaatgtatcggagaaaaaatcaaatggactacaagcacgtgtttgctgtgcttgcaccccaggtaaacctgcattgtagcaatttgtaaggatattcagatggagcactgtcacttagacattctctgggggattttctgcttgtctttcttgagctttttggaaggataattctgataaggcactcaagaaacgtacaaccacagtgctttcttcaaatcatatgagaaatactatgcatagcaaggagatgcagagccgccaggaaaattctgagttccagcacaattttctttggaatctaacaggaatctagcctgaggaagaagggaggtctccatttctatgtctggtatttgggggttttgtttgtttttgctttagcttggtgaaaaaaagttcactgaacaccaagaccagaatggatttttttaaaaaaatagatgttccttttgtgaagcaccttgattccttgattttgattttttgcaaagttagacaatggcacaaagtcaaaatgaaatcaatgtttagttcacaagtagatgtaatttactaaagaatgatacacccatatgctatatacagcttaactcacagaactgtaaaagaaaattataaaataattcaacatgtccatctttttagtgataataaaagaaagcatggtattaaactatcatagaagtagacagaaaaagaaaaaaggactcatggcattattaatataattagtgctttacatgtgttagttatacatattagaagcatatttgcctagtaaggctagtagaaccacatttcccaaagtgtgctccttaaacactcatgccttatgattttctaccaaaagtaaaaagggttgtattaagtcagaggaagatgcctctccattttccctctctttatcagaggttcacatgcctgtctgcacattaaaagctctgggaagacctgttgtaaagggacaagttgaggttgtaaaatctgcatttaaataaacatctttgatcacaaaaaaaaaaaaaaaaaaaa

SEQ ID NO: 286 - protein, 383 aa, Homo sapiens
MAGIPGLLFLLFFLLCAVGQVSPYSAPWKPTWPAYRLPVVLPQSTLNLAKPDFGAEAKLEVSSSCGPQCHKGTPLPTYEEAKQYLSYETLYANGSRTETQVGIYILSSSGDGAQHRDSGSSGKSRRKRQIYGYDSRFSIFGKDFLLNYPFSTSVKLSTGCTGTLVAEKHVLTAAHCIHDGKTYVKGTQKLRVGFLKPKFKDGGRGANDSTSAMPEQMKFQWIRVKRTHVPKGWIKGNANDIGMDYDYALLELKKPHKRKFMKIGVSPPAKQLPGGRIHFSGYDNDRPGNLVYRFCDVKDETYDLLYQQCDAQPGASGSGVYVRMWKRQQQKWERKIIGIFSGHQWVDMNGSPQDFNVAVRITPLKYAQICYWIKGNYLDCREG

SEQ ID NO: 287 - protein, 26 aa, Homo sapiens
IIGGTESKPDSRPYMALLQIVEPAVH

SEQ ID NO: 288 - DNA, 2265 bp, Homo sapiens
acgcgggatacagggaggggccatgtgcgaaccagggagacctcatcttccaaccaagcttgctgggcttgcatttaatcaatgcatggccagagaacaggagcggaacattgcctagtagaccctgaggctttacaacagtgctactgacccctatgagcctgatgctggatgaccaaccccctatggaggcccagtatgcagaggagggcccaggacctgggatcttcagagcagagcctggagaccagcagcatcccatttctcaggcggtgtgctggcgttccatgcgacgtggctgtgcagtgctgggagccctggggctgctggccggtgcaggtgttggctcatggctcctagtgctgtatctgtgtcctgctgcctctcagcccatttccgggaccttgcaggatgaggagataactttgagctgctcagaggccagcgctgaggaagctctgctccctgcactccccaaaacagtatctttcagaataaacagcgaagacttcttgctggaagcgcaagtgagggatcagccacgctggctcctggtctgccatgagggctggagccccgccctggggctgcagatctgctggagccttgggcatctcagactcactcaccacaagggagtaaacctcactgacatcaaactcaacagttcccaggagtttgctcagctctctcctagactgggaggcttcctggaggaggcgtggcagcccaggaacaactgcacttctggtcaagttgtttccctcagatgctctgagtgtggagcgaggcccctggcttcccggatagttggtgggcagtctgtggctcctgggcgctggccgtggcaggccagcgtggccctgggcttccggcacacgtgtgggggctctgtgctagcgccacgctgggtggtgactgctgcacattgtatgcacagtttcaggctggcccgcctgtccagctggcgggttcatgcggggctggtcagccacagtgccgtcaggccccaccaaggggctctggtggagaggattatcccacaccccctctacagtgcccagaatcatgactacgacgtcgccctcctgaggctccagaccgctctcaacttctcagacactgtgggcgctgtgtgcctgccggccaaggaacagcattttccgaagggctcgcggtgctgggtgtctggctggggccacacccaccctagccatacttacagctcggatatgctccaggacacggtggtgcccttgttcagcactcagctctgcaacagctcttgcgtgtacagcggagccctcaccccccgcatgctttgcgctggctacctggacggaagggctgatgcatgccagggagatagcgggggccccctagtgtgcccagatggggacacatggcgcctagtgggggtggtcagctgggggcgtgcgtgcgcagagcccaatcacccaggtgtctacgccaaggtagctgagtttctggactggatccatgacactgctcaggactccctcctctgagtcctgctgtttcctccagtctcactgcacaccactgcctcatgcttcctggggcctccagcagctccactaatggaggagaggcagtagcctccgacacagaacgcatggacctcctactactgtgtgtgaggaacagtcactacccactggccagccacccagccaacaggtctctcctcttgggccctgatttcagagtcctctttctcactagagactcaatgacagaagagaggctgggacttggttgggcatgctgtggttgctgagggatgagggggaggagagaggtaggagctggagatgaagagactgctagaagcagcaggaagcctgcccttctgccctctcccctccctgcccctgtgtgagtcttttagggagggtgactgggaggtgccccccgtcccacctttttcctgtgctctaggtgggctaagtgcctccctagaggactccatggctgagaggctcctgggcagatggggtcaaggctgggccagtcccagatgaagcctatgggagtcaggaccctctccactctccctctccactccccttcctgttctcacctggctgtggctggccctgtgtggggtgggtacactggaaaacaagaaggttggagttggtctaggacattggttttaaatgacagttctgtgaactggtccaaggaggttctgttattaaagtgatatatggtcttgaaaaaaaaaaaaaaaaaaaaaaa

SEQ ID NO: 289 - protein, 457 aa, Homo sapiens
MSLMLDDQPPMEAQYAEEGPGPGIFRAEPGDQQHPISQAVCWRSMRRGCAVLGALGLLAGAGVGSWLLVLYLCPAASQPISGTLQDEEITLSCSEASAEEALLPALPKTVSFRINSEDFLLEAQVRDQPRWLLVCHEGWSPALGLQICWSLGHLRLTHHKGVNLTDIKLNSSQEFAQLSPRLGGFLEEAWQPRNNCTSGQVVSLRCSECGARPLASRIVGGQSVAPGRWPWQASVALGFRHTCGGSVLAPRWVVTAAHCMHSFRLARLSSWRVHAGLVSHSAVRPHQGALVERIIPHPLYSAQNHDYDVALLRLQTALNFSDTVGAVCLPAKEQHFPKGSRCWVSGWGHTHPSHTYSSDMLQDTVVPLFSTQLCNSSCVYSGALTPRMLCAGYLDGRADACQGDSGGPLVCPDGDTWRLVGVVSWGRACAEPNHPGVYAKVAEFLDWIHDTAQDSLL

SEQ ID NO: 290 - DNA, 1243 bp, Homo sapiens
atggctgcccctgcttccgtcatgggcccactcgggccctctgccctgggccttctgctgctgctcctggtggtggcccctccccgggtcgcagcattggtccacagacagccagagaaccagggaatctccctaactggcagcgtggcctgtggtcggcccagcatggaggggaaaatcctgggcggcgtccctgcgcccgagaggaagtggccgtggcaggtcagcgtgcactacgcaggcctccacgtctgcggcggctccatcctcaatgagtactgggtgctgtcagctgcgcactgctttcacagggacaagaatatcaaaatctatgacatgtacgtaggcctcgtaaacctcagggtggccggcaaccacacccagtggtatgaggtgaacagggtgatcctgcaccccacatatgagatgtaccaccccatcggaggtgacgtggccctggtgcagctgaagacccgcattgtgttttctgagtccgtgctcccggtttgccttgcaactccagaagtgaaccttaccagtgccaattgctgggctacgggatggggactagtctcaaaacaaggtgagacctcagacgagctgcaggagatgcagctcccgctgatcctggagccctggtgccacctgctctacggacacatgtcctacatcatgcccgacatgctgtgtgctggggacatcctgaatgctaagaccgtgtgtgagggcgactccgggggcccacttgtctgtgaattcaaccgcagctggttgcagattggaattgtgagctggggccgaggctgctccaaccctctgtaccctggagtgtatgccagtgtttcctatttctcaaaatggatatgtgataacatagaaatcacgcccactcctgctcagccagcccctgctctctctccagctctggggcccactctcagcgtcctaatggccatgctggctggctggtcagtgctgtgaggtcaggatacccactctaggattctcatggctgcacaccctgccccagcccagctgcctccagacccctaagcatctcctgtcctggcctctctgaagcagacaagggccacctatcccgggggtggatgctgagtccaggaggtgatgagcaagtgtacaaaagaaaaaagggaagggggagaggggctggtcagggagaacccagcttgggcagagtgcacctgagatttgataagatcattaaatatttacaaagcaa

SEQ ID NO: 291 - protein, 326 aa, Homo sapiens
MAAPASVMGPLGPSALGLLLLLLVVAPPRVAALVHRQPENQGISLTGSVACGRPSMEGKILGGVPAPERKWPWQVSVHYAGLHVCGGSILNEYWVLSAAHCFHRDKNIKIYDMYVGLVNLRVAGNHTQWYEVNRVILHPTYEMYHPIGGDVALVQLKTRIVFSESVLPVCLATPEVNLTSANCWATGWGLVSKQGETSDELQEMQLPLILEPWCHLLYGHMSYIMPDMLCAGDILNAKTVCEGDSGGPLVCEFNRSWLQIGIVSWGRGCSNPLYPGVYASVSYFSKWICDNIEITPTPAQPAPALSPALGPTLSVLMAMLAGWSVL

SEQ ID NO: 292 - DNA, 1695 bp, Homo sapiens
atgcttataagcaggaacaagctgattttactactaggaatagtcttttttgaacgaggtaaatctgcaactctttcgctccccaaagctcccagttgtgggcagagtctggttaaggtacagccttggaattattttaacattttcagtcgcattcttggaggaagccaagtggagaagggttcctatccctggcaggtatctctgaaacaaaggcagaagcatatttgtggaggaagcatcgtctcaccacagtgggtgatcacggcggctcactgcattgcaaacagaaacattgtgtctactttgaatgttactgctggagagtatgacttaagccagacagacccaggagagcaaactctcactattgaaactgtcatcatacatccacatttctccaccaagaaaccaatggactatgatattgcccttttgaagatggctggagccttccaatttggccactttgtggggcccatatgtcttccagagctgcgggagcaatttgaggctggttttatttgtacaactgcaggctggggccgcttaactgaaggtggcgtcctctcacaagtcttgcaggaagtgaatctgcctattttgacctgggaagagtgtgtggcagctctgttaacactaaagaggcccatcagtgggaagacctttctttgcacaggttttcctgatggagggagagacgcatgtcagggagattcaggaggttcactcatgtgccggaataagaaaggggcctggactctggctggtgtgacttcctggggtttgggctgtggtcgaggctggagaaacaatgtgaggaaaagtgatcaaggatcccctgggatcttcacagacattagtaaagtgcttccctggatccacgaacacatccaaactggtaatcggagaaagagctccagagcctggtgcagtgagcaggatgtcatagtcagcggggctgaggggaagctgcacttcccagaaagcctccacctatattatgagagcaagcaacggtgtgtctggaccctgctggtaccagaggaaatgcatgtgttgctcagtttttcccacctagatgttgagtcttgtcaccacagttacctgtcaatgtattctttagaagacagacccattggaaaattttgtggagaaagcctcccttcatccattcttattggctctaattctctaaggctgaaattcgtctctgatgccacagattatgcagctgggtttaatcttacctataaagctcttaaaccaaactacattcctgattcaggttgcagttacttaactgtcctttttgaagaaggtctcatacagagtctaaactatcctgaaaactacagtgacaaggctaactgtgactggatttttcaagcctccaaacatcacctaattaagctttcatttcagagtctggaaatagaagaaagtggagactgcacttccgactatgtgacagtgcacagcgatgtagaaaggaagaaggaaatagctcggctgtgtggctatgatgtccccacccctgtgctgagcccctccagcatcatgctcatcagcttccaatcagatgaaaacgggacctgcaggggctttcaggctacagtctccttcattcctaaagcaggtaagaagatagagttaccaactctttggttcccagttctaatccttgtgatgtga

SEQ ID NO: 293 - protein, 564 aa, Homo sapiens
MLISRNKLILLLGIVFFERGKSATLSLPKAPSCGQSLVKVQPWNYFNIFSRILGGSQVEKGSYPWQVSLKQRQKHICGGSIVSPQWVITAAHCIANRNIVSTLNVTAGEYDLSQTDPGEQTLTIETVIIHPHFSTKKPMDYDIALLKMAGAFQFGHFVGPICLPELREQFEAGFICTTAGWGRLTEGGVLSQVLQEVNLPILTWEECVAALLTLKRPISGKTFLCTGFPDGGRDACQGDSGGSLMCRNKKGAWTLAGVTSWGLGCGRGWRNNVRKSDQGSPGIFTDISKVLPWIHEHIQTGNRRKSSRAWCSEQDVIVSGAEGKLHFPESLHLYYESKQRCVWTLLVPEEMHVLLSFSHLDVESCHHSYLSMYSLEDRPIGKFCGESLPSSILIGSNSLRLKFVSDATDYAAGFNLTYKALKPNYIPDSGCSYLTVLFEEGLIQSLNYPENYSDKANCDWIFQASKHHLIKLSFQSLEIEESGDCTSDYVTVHSDVERKKEIARLCGYDVPTPVLSPSSIMLISFQSDENGTCRGFQATVSFIPKAGKKIELPTLWFPVLILVM

SEQ ID NO: 294 - DNA, 3420 bp, Homo sapiens
atgggcctgctggccagtgctggtttgttgctgttgctggtcatcggccaccccagaagcctaggactgaagtgtggaattcgcatggtcaacatgaaaagtaaggaacctgccgtgggatctagattcttctctagaattagtagttggagaaattcaacagtgactggacatccatggcaggtctccctaaaatcagatgagcaccacttctgtggaggaagcttgattcaagaagatcgggttgttacagcagcacactgcctggacagcctcagtgagaagcagctgaagaatataactgtgacttctggggagtacagcctctttcagaaggataagcaagaacagaatattcctgtctcaaaaattattacccatcctgaatacaacagccgtgaatatatgagtcctgatattgcactgctgtatctaaaacacaaagtcaagtttggaaatgctgttcagccaatctgtcttcctgacagcgatgataaagttgaaccaggaattctttgcttatccagtggatggggcaagatttccaaaacatcagaatattcaaatgtcctacaagaaatggaacttcccatcatggatgacagagcgtgtaatactgtgctcaagagcatgaacctccctcccctgggaaggaccatgctgtgtgctggcttccctgattggggaatggacgcctgccagggggactctggaggaccactggtttgtagaagaggtggtggaatctggattcttgctgggataacttcctgggtagctggttgtgctggaggttcagttcccgtaagaaacaaccatgtgaaggcatcacttggcattttctccaaagtgtctgagttgatggattttatcactcaaaacctgttcacaggtttggatcggggccaacccctctcaaaagtgggctcaaggtatataacaaaggccctgagttctgtccaagaagtgaatggaagccagagaggaaagggtattttagacatggaaaagcaagttggatgtgatcatgactatgtatctttacgatcaagcagtggagtgctttttaatcagagatctctcatggaagacgatggaaaacaaaacaaacgtgtctgtggaaaaatattgccttcaccattgctggcagagaccagtgaggccatggttccatttgtttctgatacagaagacagtggcagtggctttgagcttaccgttactgctgtacagaagtcagaagcagggtcaggttgtgggagtctggctatattggtagaagaagggacaaatcactctgccaagtatcctgatttgtatcccagtaacacaaggtgtcattggttcatttgtgctccagagaagcacattataaagttgacatttgaggactttgctgtcaaatttagtccaaactgtatttatgatgctgttgtgatttacggtgattctgaagaaaagcacaagttagctaaactttgtggaatgttgaccatcacttcaatattcagttctagtaacatgacggtgatatactttaaaagtgatggtaaaaatcgtttacaaggcttcaaggccagatttaccattttgccctcagagtctttaaacaaatttgaaccaaagttacctccccaaaacaatcctgtatctaccgtaaaagctattctgcatgatgtctgtggcatccctccatttagtccccagtggctttccagaagaatcgcaggaggggaagaagcctgcccccactgttggccatggcaggtgggtctgaggtttctaggcgattaccaatgtggaggtgccatcatcaacccagtgtggattctgaccgcagcccactgtgtgcaattgaagaataatccactctcctggactattattgctggggaccatgacagaaacctgaaggaatcaacagagcaggtgagaagggccaaacacataatagtgcatgaagactttaacacactaagttatgactctgacattgccctaatacaactaagctctcctctggagtacaactcggtggtgaggccagtatgtctcccacacagcgcagagcctctattttcctcggagatctgtgctgtgaccggatggggaagcatcagtgcagatggtggcctagcaagtcgcctacagcagattcaagtgcatgtgttagaaagagaggtctgtgaacacacttactattctgcccatccaggagggatcacagagaagatgatctgtgctggctttgcagcatctggagagaaagatttctgccagggagactctggtgggccactagtatgtagacatgaaaatggtccctttgtcctctatggcattgtcagctggggagctggctgtgtccagccatggaagccgggtgtatttgccagagtgatgatcttcttggactggatccaatcaaaaatcaatggtcctgcttcacttcagacaaataataaatgcaaaaccttaaaacaacaattgccaccacccacaccttcaccagacagtgcatcttggccaggttgttgctctgaagcagagctagaaaagcctagaggcttttttcccacaccacggtatctactggattatagaggaagactggaatgttcttgggtgctcagagtttcagcaagcagtatggcaaaatttaccattgagtatctgtcactcctggggtctcctgtgtgtcaagactcagttctaattatttatgaagaaagacacagtaagagaaagacggcaggtggattacatggaagaagactttactcaatgactttcatgagtcctggaccgctggtgagggtgacattccatgcccttgtacgaggtgcatttggtataagctatattgacttgaaagtcctaggtccaaaggacagtaaaataaccagactttcccaaagttcaaacagagagcacttggtcccttgtgaggatgttcttctgaccaagccagaagggatcatgcagatcccaagaaattctcacagaactactatggggtgccaatggagattagtagcccctttaaatcacatcattcagcttaatattattaacttcccgatgaagccaacaacttttgtctgtcatggtcatctgcgtgtttacgaaggatttggaccaggaaaaaaattaatagcttcattcgctggaactctggcaatgatactgacaaaagacatattaaaaagagaaaaactgaattttattaacacatatatcatgcatatatgggaaaattcagtgtatgataatgtaagaagtgttggaaaaagaaaacagaagaaatttgcatcaaatttaagttatagtatggaggctgagaagtccaggatccaggtgccagcagatttggtgcctgctaagggctcactttctggttcttaggcacagcccattctc

SEQ ID NO: 295 - protein, 1134 aa, Homo sapiens
MGLLASAGLLLLLVIGHPRSLGLKCGIRMVNMKSKEPAVGSRFFSRISSWRNSTVTGHPWQVSLKSDEHHFCGGSLIQEDRVVTAAHCLDSLSEKQLKNITVTSGEYSLFQKDKQEQNIPVSKIITHPEYNSREYMSPDIALLYLKHKVKFGNAVQPICLPDSDDKVEPGILCLSSGWGKISKTSEYSNVLQEMELPIMDDRACNTVLKSMNLPPLGRTMLCAGFPDWGMDACQGDSGGPLVCRRGGGIWILAGITSWVAGCAGGSVPVRNNHVKASLGIFSKVSELMDFITQNLFTGLDRGQPLSKVGSRYITKALSSVQEVNGSQRGKGILDMEKQVGCDHDYVSLRSSSGVLFNQRSLMEDDGKQNKRVCGKILPSPLLAETSEAMVPFVSDTEDSGSGFELTVTAVQKSEAGSGCGSLAILVEEGTNHSAKYPDLYPSNTRCHWFICAPEKHIIKLTFEDFAVKFSPNCIYDAVVIYGDSEEKHKLAKLCGMLTITSIFSSSNMTVIYFKSDGKNRLQGFKARFTILPSESLNKFEPKLPPQNNPVSTVKAILHDVCGIPPFSPQWLSRRIAGGEEACPHCWPWQVGLRFLGDYQCGGAIINPVWILTAAHCVQLKNNPLSWTIIAGDHDRNLKESTEQVRRAKHIIVHEDFNTLSYDSDIALIQLSSPLEYNSVVRPVCLPHSAEPLFSSEICAVTGWGSISADGGLASRLQQIQVHVLEREVCEHTYYSAHPGGITEKMICAGFAASGEKDFCQGDSGGPLVCRHENGPFVLYGIVSWGAGCVQPWKPGVFARVMIFLDWIQSKINGPASLQTNNKCKTLKQQLPPPTPSPDSASWPGCCSEAELEKPRGFFPTPRYLLDYRGRLECSWVLRVSASSMAKFTIEYLSLLGSPVCQDSVLIIYEERHSKRKTAGGLHGRRLYSMTFMSPGPLVRVTFHALVRGAFGISYIDLKVLGPKDSKITRLSQSSNREHLVPCEDVLLTKPEGIMQIPRNSHRTTMGCQWRLVAPLNHIIQLNIINFPMKPTTFVCHGHLRVYEGFGPGKKLIASFAGTLAMILTKDILKREKLNFINTYIMHIWENSVYDNVRSVGKRKQKKFASNLSYSMEAEKSRIQVPADLVPAKGSLSGS

SEQ ID NO: 296 - DNA, 2810 bp, Homo sapiens
acttggctctgcctccgctgactctagcgccatggcccggcacctgctcctcccccttgtgatgcttgtcatcagtcccatcccaggagccttccaggactcagctctcagtcctacccaggaagaacctgaagatctggactgcgggcgccctgagccctcggcccgcatcgtgggggggctcaaacgcgcagccgggcacctggccttggcaagtgagcctgcaccatggaggtggccacatctgcgggggctccctcatcgccccctcctgggtcctctccgctgctcactgtttcatgacgaatgggacgctggagcccgcggccgagtggtcggtactgctgggcgtgcactcccaggacgggcccctggacggcgcgcacacccgcgcagtggccgccatcgtggtgccggccaactacagccaagtggagctgggcgccgacctggccctgctgcgcctggcctcacccgccagcctgggccccgccgtgtggcctgtctgcctgccccgcgcctcacaccgcttcgtgcacggcaccgcctgctgggccaccggctggggagacgtccaggaggcagatcctctgcctctcccctgggtgctacaggaagtggagctaaggctgctgggcgaggccacctgtcaatgtctctacagccagcccggtcccttcaacctcactctccagatattgccagggatgctgtgtgctggctacccagagggccgcagggacacctgccagggcgactctggggggcccctggtctgtgaggaaggcggccgctggttccaggcaggaatcaccagctttggctttggctgtggacggagaaaccgccctggagttttcactgctgtggctacctatgaggcatggatacgggagcaggtgatgggttcagagcctgggcctgcctttcccacccagccccagaagacccagtcagatccccaggagcccagggaggagaactgcaccattgccctgcctgagtgcgggaaggccccgcggccaggggcctggccctgggaggcccaggtgatggtgccaggatccagaccctgccatggggcgctggtgtctgaaagctgggtcttggcacctgccagctgctttctggacccgaacagctccgacagcccaccccgcgacctcgacgcctggcgcgtgctgctgccctcgcgcccgcgcgcggagcgggtggcgcgcctggtgcagcacgagaacgcttcgtgggacaacgcctcggacctggcgctgctgcagctgcgcacgcccgtgaacctgagtgcggcttcgcggcccgtgtgcctaccccacccggaacactacttcctgcccgggagccgctgccgcctggcccgctggggccgcggggaacccgcgcttggcccaggcgcgctgctggaggcggagctgttaggcggctggtggtgccactgcctgtacggccgccagggggcggcagtaccgctgcccggagacccgccgcacgcgctctgccctgcctaccaggaaaaggaggaggtgggcagctgctggaatgactcgcgttggagccttttgtgccaggaggaggggacctggtttctggctggaatcagagactttcccagtggctgtctacgtccccgagccttcttccctctgcagactcatggcccatggatcagccatgtgactcggggagcctacctggaggaccagctagcctgggactggggccctgatggggaggagactgagacacagacttgtcccccacacacagagcatggtgcctgtggcctgcggctggaggctgctccagtgggggtcctgtggccctggctggcagaggtgcatgtggctggtgatcgagtctgcactgggatcctcctggccccaggctgggtcctggcagccactcactgtgtcctcaggccaggctctacaacagtgccttacattgaagtgtatctgggccgggcaggggccagctccctcccacagggccaccaggtatcccgcttggtcatcagcatccggctgccccagcacctgggactcaggccccccctggccctcctggagctgagctcccgggtggagccctccccatcagccctgcccatctgtctccacccggcgggtatccccccgggggccagctgctgggtgttgggctggaaagaaccccaggaccgagtccctgtggctgctgctgtctccatcttgacacaacgaatctgtgactgcctctatcagggcatcctgccccctggaaccctctgtgtcctgtatgcagaggggcaggagaacaggtgtgagatgacctcagcaccgcccctcctgtgccagatgacggaagggtcctggatcctcgtgggcatggctgttcaagggagccgggagctgtttgctgccattggtcctgaagaggcctggatctcccagacagtgggagaggccaacctcctgccccccagtggctccccacactggcccactggaggcagcaatctctgccccccagaactggccaaggcctcgggatccccgcatgcagtctacttcctgctcctgctgactctcctgatccagagctgaggggctagggtcccagcaccacttcccccttctccaccctctacttcccgcccagtggggctggaatgtggcccagccggctggaacctcaagggccccacccaccgagattgcagcggctctggctaattgggcctctgtgcccgggctattttgaacccaggaatccttgggggtggtgggaggagcggacaataaaggtgtaaacac

SEQ ID NO: 297 - protein, 766 aa, Homo sapiens
MTNGTLEPAAEWSVLLGVHSQDGPLDGAHTRAVAAIVVPANYSQVELGADLALLRLASPASLGPAVWPVCLPRASHRFVHGTACWATGWGDVQEADPLPLPWVLQEVELRLLGEATCQCLYSQPGPFNLTLQILPGMLCAGYPEGRRDTCQGDSGGPLVCEEGGRWFQAGITSFGFGCGRRNRPGVFTAVATYEAWIREQVMGSEPGPAFPTQPQKTQSDPQEPREENCTIALPECGKAPRPGAWPWEAQVMVPGSRPCHGALVSESWVLAPASCFLDPNSSDSPPRDLDAWRVLLPSRPRAERVARLVQHENASWDNASDLALLQLRTPVNLSAASRPVCLPHPEHYFLPGSRCRLARWGRGEPALGPGALLEAELLGGWWCHCLYGRQGAAVPLPGDPPHALCPAYQEKEEVGSCWNDSRWSLLCQEEGTWFLAGIRDFPSGCLRPRAFFPLQTHGPWISHVTRGAYLEDQLAWDWGPDGEETETQTCPPHTEHGACGLRLEAAPVGVLWPWLAEVHVAGDRVCTGILLAPGWVLAATHCVLRPGSTTVPYIEVYLGRAGASSLPQGHQVSRLVISIRLPQHLGLRPPLALLELSSRVEPSPSALPICLHPAGIPPGASCWVLGWKEPQDRVPVAAAVSILTQRICDCLYQGILPPGTLCVLYAEGQENRCEMTSAPPLLCQMTEGSWILVGMAVQGSRELFAAIGPEEAWISQTVGEANLLPPSGSPHWPTGGSNLCPPELAKASGSPHAVYFLLLLTLLIQS

SEQ ID NO: 298 - protein, 245 aa, Homo sapiens
MEGPRGWLVLCVLAISLASMVTEDLCRAPDGKKGEAGRPGRRGRPGLKGEQGEPGAPGIRTGIQGLKGDQGEPGPSGNPGKVGYPGPSGPLGARGIPGIKGTKGSPGNIKDQPRPAFSAIRRNPPMGGNVVIFDTVITNQEEPYQNHSGRFVCTVPGYYYFTFQVLSQWEICLSIVSSSRGQVRRSLGFCDTTNKGLFQVVSGGMVLQLQQGDQVWVEKDPKKGHIYQGSEADSVFSGFLIFPSA

SEQ ID NO: 299 - protein, 251 aa, Homo sapiens
MKIPWGSIPVLMLLLLLGLIDISQAQLSCTGPPAIPGIPGIPGTPGPDGQPGTPGIKGEKGLPGLAGDHGEFGEKGDPGIPGNPGKVGPKGPMGPKGGPGAPGAPGPKGESGDYKATQKIAFSATRTINVPLRRDQTIRFDHVITNMNNNYEPRSGKFTCKVPGLYYFTYHASSRGNLCVNLMRGRERAQKVVTFCDYAYNTFQVTTGGMVLKLEQGENVFLQATDKNSLLGMEGANSIFSGFLLFPDMEA

SEQ ID NO: 300 - protein, 245 aa, Homo sapiens
MDVGPSSLPHLGLKLLLLLLLLPLRGQANTGCYGIPGMPGLPGAPGKDGYDGLPGPKGEPGIPAIPGIRGPKGQKGEPGLPGHPGKNGPMGPPGMPGVPGPMGIPGEPGEEGRYKQKFQSVFTVTRQTHQPPAPNSLIRFNAVLTNPQGDYDTSTGKFTCKVPGLYYFVYHASHTANLCVLLYRSGVKVVTFCGHTSKTNQVNSGGVLLRLQVGEEVWLAVNDYYDMVGIQGSDSVFSGFLLFPD

SEQ ID NO: 301 - DNA, 2526 bp, Homo sapiens
gcacacagtgcacgaagacgctgtcgggagagcccaggattcaacacgggccttgagaaatgtggctcttgtacctcctggtgccggccctgttctgcagggcaggaggctccattcccatccctcagaagttatttggggaggtgacttcccctctgttccccaagccttaccccaacaactttgaaacaaccactgtgatcacagtccccacgggatacagggtgaagctcgtcttccagcagtttgacctggagccttctgaaggctgcttctatgattatgtcaagatctctgctgataagaaaagcctggggaggttctgtgggcaactgggttctccactgggcaaccccccgggaaagaaggaatttatgtcccaagggaacaagatgctgctgaccttccacacagacttctccaacgaggagaatgggaccatcatgttctacaagggcttcctggcctactaccaagctgtggaccttgatgaatgtgcttcccggagcaaattaggggaggaggatccccagccccagtgccagcacctgtgtcacaactacgttggaggctacttctgttcctgccgtccaggctatgagcttcaggaagacaggcattcctgccaggctgagtgcagcagcgagctgtacacggaggcatcaggctacatctccagcctggagtaccctcggtcctacccccctgacctgcgctgcaactacagcatccgggtggagcggggcctcaccctgcacctcaagttcctggagccttttgatattgatgaccaccagcaagtacactgcccctatgaccagctacagatctatgccaacgggaagaacattggcgagttctgtgggaagcaaaggccccccgacctcgacaccagcagcaatgctgtggatctgctgttcttcacagatgagtcgggggacagccggggctggaagctgcgctacaccaccgagatcatcaagtgcccccagcccaagaccctagacgagttcaccatcatccagaacctgcagcctcagtaccagttccgtgactacttcattgctacctgcaagcaaggctaccagctcatagaggggaaccaggtgctgcattccttcacagctgtctgccaggatgatggcacgtggcatcgtgccatgcccagatgcaagatcaaggactgtgggcagccccgaaacctgcctaatggtgacttccgttacaccaccacaatgggagtgaacacctacaaggcccgtatccagtactactgccatgagccatattacaagatgcagaccagagctggcagcagggagtctgagcaaggggtgtacacctgcacagcacagggcatttggaagaatgaacagaagggagagaagattcctcggtgcttgccagtgtgtgggaagcccgtgaaccccgtggaacagaggcagcgcatcatcggagggcaaaaagccaagatgggcaacttcccctggcaggtgttcaccaacatccacgggcgcgggggcggggccctgctgggcgaccgctggatcctcacagctgcccacaccctgtatcccaaggaacacgaagcgcaaagcaacgcctctttggatgtgttcctgggccacacaaatgtggaagagctcatgaagctaggaaatcaccccatccgcagggtcagcgtccacccggactaccgtcaggatgagtcctacaattttgagggggacatcgccctgctggagctggaaaatagtgtcaccctgggtcccaacctcctccccatctgcctccctgacaacgataccttctacgacctgggcttgatgggctatgtcagtggcttcggggtcatggaggagaagattgctcatgacctcaggtttgtccgtctgcccgtagctaatccacaggcctgtgagaactggctccggggaaagaataggatggatgtgttctctcaaaacatgttctgtgctggacacccatctctaaagcaggacgcctgccagggggatagtgggggcgtttttgcagtaagggacccgaacactgatcgctgggtggccacgggcatcgtgtcctggggcatcgggtgcagcaggggctatggcttctacaccaaagtgctcaactacgtggactggatcaagaaagagatggaggaggaggactgagcccagaattcactaggttcgaatccagagagcagtgtggaaaaaaaaaaacaaaaaacaactgaccagttgttgataaccactaagagtctctattaaaattactgatgcagaaagaccgtgtgtgaaattctctttcctgtagtcccattgatgtactttacctgaaacaacccaaagggcccctttctttcttctgaggattgcagaggatatagttatcaatctctagttgtcactttcctcttccactttgataccattgggtcattgaatataactttttccaaataaagttttatgagaaatgccagtgtgcaaaaaaaaaaaaaaaaaaaaaaaaaaaaaa

SEQ ID NO: 302 - protein, 705 aa, Homo sapiens
MWLLYLLVPALFCRAGGSIPIPQKLFGEVTSPLFPKPYPNNFETTTVITVPTGYRVKLVFQQFDLEPSEGCFYDYVKISADKKSLGRFCGQLGSPLGNPPGKKEFMSQGNKMLLTFHTDFSNEENGTIMFYKGFLAYYQAVDLDECASRSKSGEEDPQPQCQHLCHNYVGGYFCSCRPGYELQEDRHSCQAECSSELYTEASGYISSLEYPRSYPPDLRCNYSIRVERGLTLHLKFLEPFDIDDHQQVHCPYDQLQIYANGKNIGEFCGKQRPPDLDTSSNAVDLLFFTDESGDSRGWKLRYTTEIIKCPQPKTLDEFTIIQNLQPQYQFRDYFIATCKQGYQLIEGNQVLHSFTAVCQDDGTWHRAMPRCKIKDCGQPRNLPNGDFRYTTTMGVNTYKARIQYYCHEPYYKMQTRAGSRESEQGVYTCTAQGIWKNEQKGEKIPRCLPVCGKPVNPVEQRQRIIGGQKAKMGNFPWQVFTNIHGRGGGALLGDRWILTAAHTLYPKEHEAQSNASLDVFLGHTNVEELMKLGNHPIRRVSVHPDYRQDESYNFEGDIALLELENSVTLGPNLLPICLPDNDTFYDLGLMGYVSGFGVMEEKIAHDLRFVRLPVANPQACENWLRGKNRMDVFSQNMFCAGHPSLKQDACQGDSGGVFAVRDPNTDRWVATGIVSWGIGCSRGYGFYTKVLNYVDWIKKEMEEED

SEQ ID NO: 303 - DNA, 2714 bp, Homo sapiens
aatcttatgaacagaaccaggacagggaggctggccggaggttcctgcagagggagcgtcaaggccctgtgctgctgtccctgggggccagaggggttgcccagcatgcccactggcaggagagagggaactgacccacttgctcctaccagcttctgaaggctccaaagtccggaggtgcagaaagccaggaccaagagacaggcagctcaccagggtggacaaatcgccagagatgtggtgcattgtcctgttttcacttttggcatgggtttatgctgagcctaccatgtatggggagatcctgtcccctaactatcctcaggcatatcccagtgaggtagagaaatcttgggacatagaagttcctgaagggtatgggattcacctctacttcacccatctggacattgagctgtcagagaactgtgcgtatgactcagtgcagataatctcaggagacactgaagaagggaggctctgtggacagaggagcagtaacaatccccactctccaattgtggaagagttccaagtcccatacaacaaactccaggtgatctttaagtcagacttttccaatgaagagcgttttacggggtttgctgcatactatgttgccacagacataaatgaatgcacagattttgtagatgtcccttgtagccacttctgcaacaatttcattggtggttacttctgctcctgccccccggaatatttcctccatgatgacatgaagaattgcggagttaattgcagtggggatgtattcactgcactgattggggagattgcaagtcccaattatcccaaaccatatccagagaactcaaggtgtgaataccagatccggttggagaaagggttccaagtggtggtgaccttgcggagagaagattttgatgtggaagcagctgactcagcgggaaactgccttgacagtttagtttttgttgcaggagatcggcaatttggtccttactgtggtcatggattccctgggcctctaaatattgaaaccaagagtaatgctcttgatatcatcttccaaactgatctaacagggcaaaaaaagggctggaaacttcgctatcatggagatccaatgccctgccctaaggaagacactcccaattctgtttgggagcctgcgaaggcaaaatatgtctttagagatgtggtgcagataacctgtctggatgggtttgaagttgtggagggacgtgttggtgcaacatctttctattcgacttgtcaaagcaatggaaagtggagtaattccaaactgaaatgtcaacctgtggactgtggcattcctgaatccattgagaatggtaaagttgaagacccagagagcactttgtttggttctgtcatccgctacacttgtgaggagccatattactacatggaaaatggaggaggtggggagtatcactgtgctggtaacgggagctgggtgaatgaggtgctgggcccggagctgccgaaatgtgttccagtctgtggagtccccagagaaccctttgaagaaaaacagaggataattggaggatccgatgcagatattaaaaacttcccctggcaagtcttctttgacaacccatgggctggtggagcgctcattaatgagtactgggtgctgacggctgctcatgttgtggagggaaacagggagccaacaatgtatgttgggtccacctcagtgcagacctcacggctggcaaaatccaagatgctcactcctgagcatgtgtttattcatccgggatggaagctgctggaagtcccagaaggacgaaccaattttgataatgacattgcactggtgcggctgaaagacccagtgaaaatgggacccaccgtctctcccatctgcctaccaggcacctcttccgactacaacctcatggatggggacctgggactgatctcaggctggggccgaacagagaagagagatcgtgctgttcgcctcaaggcggcaaggttacctgtagctcctttaagaaaatgcaaagaagtgaaagtggagaaacccacagcagatgcagaggcctatgttttcactcctaacatgatctgtgctggaggagagaagggcatggatagctgtaaaggggacagtggtggggcctttgctgtacaggatcccaatgacaagaccaaattctacgcagctggcctggtgtcctgggggccccagtgtgggacctatgggctctacacacgggtaaagaactatgttgactggataatgaagactatgcaggaaaatagcaccccccgtgaggactaatccagatacatcccaccagcctctccaagggtggtgaccaatgcattaccttctgttccttatgatattctcattatttcatcatgactgaaagaagacacgagcgaatgatttaaatagaacttgattgttgagacgccttgctagaggtagagtttgatcatagaattgtgctggtcatacatttgtggtctgactccttggggtcctttccccggagtacctattgtagataacactatgggtggggcactcctttcttgcactattccacagggataccttaattctttgtttcctctttacctgttcaaaattccatttacttgatcattctcagtatccactgtctatgtacaataaaggatgtttataagcaaaaaaaaaaaaaaaaaaaaaaaaaaaaaaaaaa

SEQ ID NO: 304 - protein, 688 aa, Homo sapiens
MWCIVLFSLLAWVYAEPTMYGEILSPNYPQAYPSEVEKSWDIEVPEGYGIHLYFTHLDIELSENCAYDSVQIISGDTEEGRLCGQRSSNNPHSPIVEEFQVPYNKLQVIFKSDFSNEERFTGFAAYYVATDINECTDFVDVPCSHFCNNFIGGYFCSCPPEYFLHDDMKNCGVNCSGDVFTALIGEIASPNYPKPYPENSRCEYQIRLEKGFQVVVTLRREDFDVEAADSAGNCLDSLVFVAGDRQFGPYCGHGFPGPLNIETKSNALDIIFQTDLTGQKKGWKLRYHGDPMPCPKEDTPNSVWEPAKAKYVFRDVVQITCLDGFEVVEGRVGATSFYSTCQSNGKWSNSKLKCQPVDCGIPESIENGKVEDPESTLFGSVIRYTCEEPYYYMENGGGGEYHCAGNGSWVNEVLGPELPKCVPVCGVPREPFEEKQRIIGGSDADIKNFPWQVFFDNPWAGGALINEYWVLTAAHVVEGNREPTMYVGSTSVQTSRLAKSKMLTPEHVFIHPGWKLLEVPEGRTNFDNDIALVRLKDPVKMGPTVSPICLPGTSSDYNLMDGDLGLISGWGRTEKRDRAVRLKAARLPVAPLRKCKEVKVEKPTADAEAYVFTPNMICAGGEKGMDSCKGDSGGAFAVQDPNDKTKFYAAGLVSWGPQCGTYGLYTRVKNYVDWIMKTMQENSTPRED

SEQ ID NO: 305 - protein, 252 aa, Homo sapiens
MFFWCACCLMVAWRVSASDAEHCPELPPVDNSIFVAKEVEGQILGTYVCIKGYHLVGKKTLFCNASKEWDNTTTECRLGHCPDPVLVNGEFSSSGPVNVSDKITFMCNDHYILKGSNRSQCLEDHTWAPPFPICKSRDCDPPGNPVHGYFEGNNFTLGSTISYYCEDRYYLVGVQEQQCVDGEWSSALPVCKLIQEAPKPECEKALLAFQESKNLCEAMENFMQQLKESGMTMEELKYSLELKKAELKAKLL

SEQ ID NO: 306 - protein, 597 aa, Homo sapiens
MHPPKTPSGALHRKRKMAAWPFSRLWKVSDPILFQMTLIAALLPAVLGNCGPPPTLSFAAPMDITLTETRFKTGTTLKYTCLPGYVRSHSTQTLTCNSDGEWVYNTFCIYKRCRHPGELRNGQVEIKTDLSFGSQIEFSCSEGFFLIGSTTSRCEVQDRGVGWSHPLPQCEIVKCKPPPDIRNGRHSGEENFYAYGFSVTYSCDPRFSLLGHASISCTVENETIGVWRPSPPTCEKITCRKPDVSHGEMVSGFGPIYNYKDTIVFKCQKGFVLRGSSVIHCDADSKWNPSPPACEPNSCINLPDIPHASWETYPRPTKEDVYVVGTVLRYRCHPGYKPTTDEPTTVICQKNLRWTPYQGCEALCCPEPKLNNGEITQHRKSRPANHCVYFYGDEISFSCHETSRFSAICQGDGTWSPRTPSCGDICNFPPKIAHGHYKQSSSYSFFKEEIIYECDKGYILVGQAKLSCSYSHWSAPAPQCKALCRKPELVNGRLSVDKDQYVEPENVTIQCDSGYGVVGPQSITCSGNRTWYPEVPKCEWETPEGCEQVLTGKRLMQCLPNPEDVKMALEVYKLSLEIEQLELQRDSARQSTLDKEL

SEQ ID NO: 307 - DNA, 1963 bp, Homo sapiens
cgaacacctccaacatgaagcttcttcatgttttcctgttatttctgtgcttccacttaaggttttgcaaggtcacttatacatctcaagaggatctggtggagaaaaagtgcttagcaaaaaaatatactcacctctcctgcgataaagtcttctgccagccatggcagagatgcattgagggcacctgtgtttgtaaactaccgtatcagtgcccaaagaatggcactgcagtgtgtgcaactaacaggagaagcttcccaacatactgtcaacaaaagagtttggaatgtcttcatccagggacaaagtttttaaataacggaacatgcacagccgaaggaaagtttagtgtttccttgaagcatggaaatacagattcagagggaatagttgaagtaaaacttgtggaccaagataagacaatgttcatatgcaaaagcagctggagcatgagggaagccaacgtggcctgccttgaccttgggtttcaacaaggtgctgatactcaaagaaggtttaagttgtctgatctctctataaattccactgaatgtctacatgtgcattgccgaggattagagaccagtttggctgaatgtacttttactaagagaagaactatgggttaccaggatttcgctgatgtggtttgttatacacagaaagcagattctccaatggatgacttctttcagtgtgtgaatgggaaatacatttctcagatgaaagcctgtgatggtatcaatgattgtggagaccaaagtgatgaactgtgttgtaaagcatgccaaggcaaaggcttccattgcaaatcgggtgtttgcattccaagccagtatcaatgcaatggtgaggtggactgcattacaggggaagatgaagttggctgtgcaggctttgcatctgtggctcaagaagaaacagaaattttgactgctgacatggatgcagaaagaagacggataaaatcattattacctaaactatcttgtggagttaaaaacagaatgcacattcgaaggaaacgaattgtgggaggaaagcgagcacaactgggagacctcccatggcaggtggcaattaaggatgccagtggaatcacctgtgggggaatttatattggtggctgttggattctgactgctgcacattgtctcagagccagtaaaactcatcgttaccaaatatggacaacagtagtagactggatacaccccgaccttaaacgtatagtaattgaatacgtggatagaattattttccatgaaaactacaatgcaggcacttaccaaaatgacatcgctttgattgaaatgaaaaaagacggaaacaaaaaagattgtgagctgcctcgttccatccctgcctgtgtcccctggtctccttacctattccaacctaatgatacatgcatcgtttctggctggggacgagaaaaagataacgaaagagtcttttcacttcagtggggtgaagttaaactaataagcaactgctctaagttttacggaaatcgtttctatgaaaaagaaatggaatgtgcaggtacatatgatggttccatcgatgcctgtaaaggggactctggaggccccttagtctgtatggatgccaacaatgtgacttatgtctggggtgttgtgagttggggggaaaactgtggaaaaccagagttcccaggtttttacaccaaagtggccaattattttgactggattagctaccatgtaggaaggccttttatttctcagtacaatgtataaaattgtgatctctctcttcattctattctttttctctcaagagttccatttaatggaaataaaacggtataattaataattctctaggggggaaaaatgaagcaaatctcattggatatttttaaaggtctccacagagtttatgccatattggaattttgttgtataattctcaaataaatattttggtgaagcat

SEQ ID NO: 308 - protein, 583 aa, Homo sapiens
MKLLHVFLLFLCFHLRFCKVTYTSQEDLVEKKCLAKKYTHLSCDKVFCQPWQRCIEGTCVCKLPYQCPKNGTAVCATNRRSFPTYCQQKSLECLHPGTKFLNNGTCTAEGKFSVSLKHGNTDSEGIVEVKLVDQDKTMFICKSSWSMREANVACLDLGFQQGADTQRRFKLSDLSINSTECLHVHCRGLETSLAECTFTKRRTMGYQDFADVVCYTQKADSPMDDFFQCVNGKYISQMKACDGINDCGDQSDELCCKACQGKGFHCKSGVCIPSQYQCNGEVDCITGEDEVGCAGFASVAQEETEILTADMDAERRRIKSLLPKLSCGVKNRMHIRRKRIVGGKRAQLGDLPWQVAIKDASGITCGGIYIGGCWILTAAHCLRASKTHRYQIWTTVVDWIHPDLKRIVIEYVDRIIFHENYNAGTYQNDIALIEMKKDGNKKDCELPRSIPACVPWSPYLFQPNDTCIVSGWGREKDNERVFSLQWGEVKLISNCSKFYGNRFYEKEMECAGTYDGSIDACKGDSGGPLVCMDANNVTYVWGVVSWGENCGKPEFPGVYTKVANYFDWISYHVGRPFISQYNV

SEQ ID NO: 309 - protein, 449 aa, Homo sapiens
MMKTLLLFVGLLLTWESGQVLGDQTVSDNELQEMSNQGSKYVNKEIQNAVNGVKQIKTLIEKTNEERKTLLSNLEEAKKKKEDALNETRESETKLKELPGVCNETMMALWEECKPCLKQTCMKFYARVCRSGSGLVGRQLEEFLNQSSPFYFWMNGDRIDSLLENDRQQTHMLDVMQDHFSRASSIIDELFQDRFFTREPQDTYHYLPFSLPHRRPHFFFPKSRIVRSLMPFSPYEPLNFHAMFQPFLEMIHEAQQAMDIHFHSPAFQHPPTEFIREGDDDRTVCREIRHNSTGCLRMKDQCDKCREILSVDCSTNNPSQAKLRRELDESLQVAERLTRKYNELLKSYQWKMLNTSSLLEQLNEQFNWVSRLANLTQGEDQYYLRVTTVASHTSDSDVPSGVTEVVVKLFDSDPITVTVPVEVSRKNPKFMETVAEKALQEYRKKHREE

SEQ ID NO: 310 - DNA, 2609 bp, Homo sapiens
ggctctctacctctcgccgcccctagggaggacaccatgggcccactgatggttcttttttgcctgctgttcctgtacccaggtctggcagactcggctccctcctgccctcagaacgtgaatatctcgggtggcaccttcaccctcagccatggctgggctcctgggagccttctcacctactcctgcccccagggcctgtacccatccccagcatcacggctgtgcaagagcagcggacagtggcagaccccaggagccacccggtctctgtctaaggcggtctgcaaacctgtgcgctgtccagcccctgtctcctttgagaatggcatttataccccacggctggggtcctatcccgtgggtggcaatgtgagcttcgagtgtgaggatggcttcatattgcggggctcgcctgtgcgtcagtgtcgccccaacggcatgtgggatggagaaacagctgtgtgtgataatggggctggccactgccccaacccaggcatttcactgggcgcagtgcggacaggcttccgctttggtcatggggacaaggtccgctatcgctgctcctcgaatcttgtgctcacggggtcttcggagcgggagtgccagggcaacggggtctggagtggaacggagcccatctgccgccaaccctactcttatgacttccctgaggacgtggcccctgccctgggcacttccttctcccacatgcttggggccaccaatcccacccagaagacaaaggaaagcctgggccgtaaaatccaaatccagcgctctggtcatctgaacctctacctgctcctggactgttcgcagagtgtgtcggaaaatgactttctcatcttcaaggagagcgcctccctcatggtggacaggatcttcagctttgagatcaatgtgagcgttgccattatcacctttgcctcagagcccaaagtcctcatgtctgtcctgaacgacaactcccgggatatgactgaggtgatcagcagcctggaaaatgccaactataaagatcatgaaaatggaactgggactaacacctatgcagccttaaacagtgtctatctcatgatgaacaaccaaatgcgactcctcggcatggaaacgatggcctggcaggaaatccgacatgccatcatccttctgacagatggaaagtccaatatgggtggctctcccaagacagctgttgaccatatcagagagatcctgaacatcaaccagaagaggaatgactatctggacatctatgccatcggggtgggcaagctggatgtggactggagagaactgaatgagctagggtccaagaaggatggtgagaggcatgccttcattctgcaggacacaaaggctctgcaccaggtctttgaacatatgctggatgtctccaagctcacagacaccatctgcggggtggggaacatgtcagcaaacgcctctgaccaggagaggacaccctggcatgtcactattaagcccaagagccaagagacctgccggggggccctcatctccgaccaatgggtcctgacagcagctcattgcttccgcgatggcaacgaccactccctgtggagggtcaatgtgggagaccccaaatcccagtggggcaaagaattccttattgagaaggcggtgatctccccagggtttgatgtctttgccaaaaagaaccagggaatcctggagttctatggtgatgacatagctctgctgaagctggcccagaaagtaaagatgtccacccatgccaggcccatctgccttccctgcacgatggaggccaatctggctctgcggagacctcaaggcagcacctgtagggaccatgagaatgaactgctgaacaaacagagtgttcctgctcattttgtcgccttgaatgggagcaaactgaacattaaccttaagatgggagtggagtggacaagctgtgccgaggttgtctcccaagaaaaaaccatgttccccaacttgacagatgtcagggaggtggtgacagaccagttcctatgcagtgggacccaggaggatgagagtccctgcaagggagaatctgggggagcagttttccttgagcggagattcaggttttttcaggtgggtctggtgagctggggtctttacaacccctgccttggctctgctgacaaaaactcccgcaaaagggcccctcgtagcaaggtcccgccgccacgagactttcacatcaatctcttccgcatgcagccctggctgaggcagcacctgggggatgtcctgaattttttacccctctagccatggccactgagccctctgctgccctgccagaatctgccgcccctccatcttctacctctgaatggccacccttagaccctgtgatccatcctctctcctagctgagtaaatccgggtctctaggatgccagaggcagcgcacacaagctgggaaatcctcagggctcctaccagcaggactgcctcgctgccccacctcccgctccttggcctgtccccagattccttccctggttgacttgactcatgcttgtttcactttcacatggaatttcccagttatgaaattaataaaaatcaatggtttccac

SEQ ID NO: 311 - protein, 752 aa, Homo sapiens
MGPLMVLFCLLFLYPGLADSAPSCPQNVNISGGTFTLSHGWAPGSLLTYSCPQGLYPSPASRLCKSSGQWQTPGATRSLSKAVCKPVRCPAPVSFENGIYTPRLGSYPVGGNVSFECEDGFILRGSPVRQCRPNGMWDGETAVCDNGAGHCPNPGISLGAVRTGFRFGHGDKVRYRCSSNLVLTGSSERECQGNGVWSGTEPICRQPYSYDFPEDVAPALGTSFSHMLGATNPTQKTKESLGRKIQIQRSGHLNLYLLLDCSQSVSENDFLIFKESASLMVDRIFSFEINVSVAIITFASEPKVLMSVLNDNSRDMTEVISSLENANYKDHENGTGTNTYAALNSVYLMMNNQMRLLGMETMAWQEIRHAIILLTDGKSNMGGSPKTAVDHIREILNINQKRNDYLDIYAIGVGKLDVDWRELNELGSKKDGERHAFILQDTKALHQVFEHMLDVSKLTDTICGVGNMSANASDQERTPWHVTIKPKSQETCRGALISDQWVLTAAHCFRDGNDHSLWRVNVGDPKSQWGKEFLIEKAVISPGFDVFAKKNQGILEFYGDDIALLKLAQKVKMSTHARPICLPCTMEANLALRRPQGSTCRDHENELLNKQSVPAHFVALNGSKLNINLKMGVEWTSCAEVVSQEKTMFPNLTDVREVVTDQFLCSGTQEDESPCKGESGGAVFLERRFRFFQVGLVSWGLYNPCLGSADKNSRKRAPRSKVPPPRDFHINLFRMQPWLRQHLGDVLNFLPL

SEQ ID NO: 312 - protein, 1663 aa, Homo sapiens
MGPTSGPSLLLLLLTHLPLALGSPMYSIITPNILRLESEETMVLEAHDAQGDVPVTVTVHDFPGKKLVLSSEKTVLTPATNHMGNVTFTIPANREFKSEKGRNKFVTVQATFGTQVVEKVVLVSLQSGYLFIQTDKTIYTPGSTVLYRIFTVNHKLLPVGRTVMVNIENPEGIPVKQDSLSSQNQLGVLPLSWDIPELVNMGQWKIRAYYENSPQQVFSTEFEVKEYVLPSFEVIVEPTEKFYYIYNEKGLEVTITARFLYGKKVEGTAFVIFGIQDGEQRISLPESLKRIPIEDGSGEVVLSRKVLLDGVQNLRAEDLVGKSLYVSATVILHSGSDMVQAERSGIPIVTSPYQIHFTKTPKYFKPGMPFDLMVFVTNPDGSPAYRVPVAVQGEDTVQSLTQGDGVAKLSINTHPSQKPLSITVRTKKQELSEAEQATRTMQALPYSTVGNSNNYLHLSVLRTELRPGETLNVNFLLRMDRAHEAKIRYYTYLIMNKGRLLKAGRQVREPGQDLVVLPLSITTDFIPSFRLVAYYTLIGASGQREVVADSVWVDVKDSCVGSLVVKSGQSEDRQPVPGQQMTLKIEGDHGARVVLVAVDKGVFVLNKKNKLTQSKIWDVVEKADIGCTPGSGKDYAGVFSDAGLTFTSSSGQQTAQRAELQCPQPAARRRRSVQLTEKRMDKVGKYPKELRKCCEDGMRENPMRFSCQRRTRFISLGEACKKVFLDCCNYITELRRQHARASHLGLARSNLDEDIIAEENIVSRSEFPESWLWNVEDLKEPPKNGISTKLMNIFLKDSITTWEILAVSMSDKKGICVADPFEVTVMQDFFIDLRLPYSVVRNEQVEIRAVLYNYRQNQELKVRVELLHNPAFCSLATTKRRHQQTVTIPPKSSLSVPYVIVPLKTGLQEVEVKAAVYHHFISDGVRKSLKVVPEGIRMNKTVAVRTLDPERLGREGVQKEDIPPADLSDQVPDTESETRILLQGTPVAQMTEDAVDAERLKHLIVTPSGCGEQNMIGMTPTVIAVHYLDETEQWEKFGLEKRQGALELIKKGYTQQLAFRQPSSAFAAFVKRAPSTWLTAYVVKVFSLAVNLIAIDSQVLCGAVKWLILEKQKPDGVFQEDAPVIHQEMIGGLRNNNEKDMALTAFVLISLQEAKDICEEQVNSLPGSITKAGDFLEANYMNLQRSYTVAIAGYALAQMGRLKGPLLNKFLTTAKDKNRWEDPGKQLYNVEATSYALLALLQLKDFDFVPPVVRWLNEQRYYGGGYGSTQATFMVFQALAQYQKDAPDHQELNLDVSLQLPSRSSKITHRIHWESASLLRSEETKENEGFTVTAEGKGQGTLSVVTMYHAKAKDQLTCNKFDLKVTIKPAPETEKRPQDAKNTMILEICTRYRGDQDATMSILDISMMTGFAPDTDDLKQLANGVDRYISKYELDKAFSDRNTLIIYLDKVSHSEDDCLAFKVHQYFNVELIQPGAVKVYAYYNLEESCTRFYHPEKEDGKLNKLCRDELCRCAEENCFIQKSDDKVTLEERLDKACEPGVDYVYKTRLVKVQLSNDFDEYIMAIEQTIKSGSDEVQVGQQRTFISPIKCREALKLEEKKHYLMWGLSSDFWGEKPNLSYIIGKDTWVEHWPEEDECQDEENQKQCQDLGAFTESMVVFGCPN

SEQ ID NO: 313 - protein, 1744 aa, Homo sapiens
MRLLWGLIWASSFFTLSLQKPRLLLFSPSVVHLGVPLSVGVQLQDVPRGQVVKGSVFLRNPSRNNVPCSPKVDFTLSSERDFALLSLQVPLKDAKSCGLHQLLRGPEVQLVAHSPWLKDSLSRTTNIQGINLLFSSRRGHLFLQTDQPIYNPGQRVRYRVFALDQKMRPSTDTITVMVENSHGLRVRKKEVYMPSSIFQDDFVIPDISEPGTWKISARFSDGLESNSSTQFEVKKYVLPNFEVKITPGKPYILTVPGHLDEMQLDIQARYIYGKPVQGVAYVRFGLLDEDGKKTFFRGLESQTKLVNGQSHISLSKAEFQDALEKLNMGITDLQGLRLYVAAAIIESPGGEMEEAELTSWYFVSSPFSLDLSKTKRHLVPGAPFLLQALVREMSGSPASGIPVKVSATVSSPGSVPEVQDIQQNTDGSGQVSIPIIIPQTISELQLSVSAGSPHPAIARLTVAAPPSGGPGFLSIERPDSRPPRVGDTLNLNLRAVGSGATFSHYYYMILSRGQIVFMNREPKRTLTSVSVFVDHHLAPSFYFVAFYYHGDHPVANSLRVDVQAGACEGKLELSVDGAKQYRNGESVKLHLETDSLALVALGALDTALYAAGSKSHKPLNMGKVFEAMNSYDLGCGPGGGDSALQVFQAAGLAFSDGDQWTLSRKRLSCPKEKTTRKKRNVNFQKAINEKLGQYASPTAKRCCQDGVTRLPMMRSCEQRAARVQQPDCREPFLSCCQFAESLRKKSRDKGQAGLQRALEILQEEDLIDEDDIPVRSFFPENWLWRVETVDRFQILTLWLPDSLTTWEIHGLSLSKTKGLCVATPVQLRVFREFHLHLRLPMSVRRFEQLELRPVLYNYLDKNLTVSVHVSPVEGLCLAGGGGLAQQVLVPAGSARPVAFSVVPTAAAAVSLKVVARGSFEFPVGDAVSKVLQIEKEGAIHREELVYELNPLDHRGRTLEIPGNSDPNMIPDGDFNSYVRVTASDPLDTLGSEGALSPGGVASLLRLPRGCGEQTMIYLAPTLAASRYLDKTEQWSTLPPETKDHAVDLIQKGYMRIQQFRKADGSYAAWLSRDSSTWLTAFVLKVLSLAQEQVGGSPEKLQETSNWLLSQQQADGSFQDPCPVLDRSMQGGLVGNDETVALTAFVTIALHHGLAVFQDEGAEPLKQRVEASISKANSFLGEKASAGLLGAHAAAITAYALSLTKAPVDLLGVAHNNLMAMAQETGDNLYWGSVTGSQSNAVSPTPAPRNPSDPMPQAPALWIETTAYALLHLLLHEGKAEMADQASAWLTRQGSFQGGFRSTQDTVIALDALSAYWIASHTTEERGLNVTLSSTGRNGFKSHALQLNNRQIRGLEEELQFSLGSKINVKVGGNSKGTLKVLRTYNVLDMKNTTCQDLQIEVTVKGHVEYTMEANEDYEDYEYDELPAKDDPDAPLQPVTPLQLFEGRRNRRRREAPKVVEEQESRVHYTVCIWRNGKVGLSGMAIADVTLLSGFHALRADLEKLTSLSDRYVSHFETEGPHVLLYFDSVPTSRECVGFEAVQEVPVGLVQPASATLYDYYNPERRCSVFYGAPSKSRLLATLCSAEVCQCAEGKCPRQRRALERGLQDEDGYRMKFACYYPRVEYGFQVKVLREDSRAAFRLFETKITQVLHFTKDVKAAANQMRNFLVRASCRLRLEPGKEYLIMGLDGATYDLEGHPQYLLDSNSWIEEMPSERLCRSTRQRAACAQLNDFLQEYGTQGCQV

SEQ ID NO: 314 - protein, 1676 aa, Homo sapiens
MGLLGILCFLIFLGKTWGQEQTYVISAPKIFRVGASENIVIQVYGYTEAFDATISIKSYPDKKFSYSSGHVHLSSENKFQNSAILTIQPKQLPGGQNPVSYVYLEVVSKHFSKSKRMPITYDNGFLFIHTDKPVYTPDQSVKVRVYSLNDDLKPAKRETVLTFIDPEGSEVDMVEEIDHIGIISFPDFKIPSNPRYGMWTIKAKYKEDFSTTGTAYFEVKEYVLPHFSVSIEPEYNFIGYKNFKNFEITIKARYFYNKVVTEADVYITFGIREDLKDDQKEMMQTAMQNTMLINGIAQVTFDSETAVKELSYYSLEDLNNKYLYIAVTVIESTGGFSEEAEIPGIKYVLSPYKLNLVATPLFLKPGIPYPIKVQVKDSLDQLVGGVPVILNAQTIDVNQETSDLDPSKSVTRVDDGVASFVLNLPSGVTVLEFNVKTDAPDLPEENQAREGYRAIAYSSLSQSYLYIDWTDNHKALLVGEHLNIIVTPKSPYIDKITHYNYLILSKGKIIHFGTREKFSDASYQSINIPVTQNMVPSSRLLVYYIVTGEQTAELVSDSVWLNIEEKCGNQLQVHLSPDADAYSPGQTVSLNMATGMDSWVALAAVDSAVYGVQRGAKKPLERVFQFLEKSDLGCGAGGGLNNANVFHLAGLTFLTNANADDSQENDEPCKEILRPRRTLQKKIEEIAAKYKHSVVKKCCYDGACVNNDETCEQRAARISLGPRCIKAFTECCVVASQLRANISHKDMQLGRLHMKTLLPVSKPEIRSYFPESWLWEVHLVPRRKQLQFALPDSLTTWEIQGIGISNTGICVADTVKAKVFKDVFLEMNIPYSVVRGEQIQLKGTVYNYRTSGMQFCVKMSAVEGICTSESPVIDHQGTKSSKCVRQKVEGSSSHLVTFTVLPLEIGLHNINFSLETWFGKEILVKTLRVVPEGVKRESYSGVTLDPRGIYGTISRRKEFPYRIPLDLVPKTEIKRILSVKGLLVGEILSAVLSQEGINILTHLPKGSAEAELMSVVPVFYVFHYLETGNHWNIFHSDPLIEKQKLKKKLKEGMLSIMSYRNADYSYSVWKGGSASTWLTAFALRVLGQVNKYVEQNQNSICNSLLWLVENYQLDNGSFKENSQYQPIKLQGTLPVEARENSLYLTAFTVIGIRKAFDICPLVKIDTALIKADNFLLENTLPAQSTFTLAISAYALSLGDKTHPQFRSIVSALKREALVKGNPPIYRFWKDNLQHKDSSVPNTGTARMVETTAYALLTSLNLKDINYVNPVIKWLSEEQRYGGGFYSTQDTINAIEGLTEYSLLVKQLRLSMDIDVSYKHKGALHNYKMTDKNFLGRPVEVLLNDDLIVSTGFGSGLATVHVTTVVHKTSTSEEVCSFYLKIDTQDIEASHYRGYGNSDYKRIVACASYKPSREESSSGSSHAVMDISLPTGISANEEDLKALVEGVDQLFTDYQIKDGHVILQLNSIPSSDFLCVRFRIFELFEVGFLSPATFTVYEYHRPDKQCTMFYSTSNIKIQKVCEGAACKCVEADCGQMQEELDLTISAETRKQTACKPEIAYAYKVSITSITVENVFVKYKATLLDIYKTGEAVAEKDSEITFIKKVTCTNAELVKGRQYLIMGKEALQIKYNFSFRYIYPLDSLTWIEYWPRDTTCSSCQAFLANLDEFAEDIFLNGC

SEQ ID NO: 315 - protein, 934 aa, Homo sapiens
MARRSVLYFILLNALINKGQACFCDHYAWTQWTSCSKTCNSGTQSRHRQIVVDKYYQENFCEQICSKQETRECNWQRCPINCLLGDFGPWSDCDPCIEKQSKVRSVLRPSQFGGQPCTEPLVAFQPCIPSKLCKIEEADCKNKFRCDSGRCIARKLECNGENDCGDNSDERDCGRTKAVCTRKYNPIPSVQLMGNGFHFLAGEPRGEVLDNSFTGGICKTVKSSRTSNPYRVPANLENVGFEVQTAEDDLKTDFYKDLTSLGHNENQQGSFSSQGGSSFSVPIFYSSKRSENINHNSAFKQAIQASHKKDSSFIRIHKVMKVLNFTTKAKDLHLSDVFLKALNHLPLEYNSALYSRIFDDFGTHYFTSGSLGGVYDLLYQFSSEELKNSGLTEEEAKHCVRIETKKRVLFAKKTKVEHRCTTNKLSEKHEGSFIQGAEKSISLIRGGRSEYGAALAWEKGSSGLEEKTFSEWLESVKENPAVIDFELAPIVDLVRNIPCAVTKRNNLRKALQEYAAKFDPCQCAPCPNNGRPTLSGTECLCVCQSGTYGENCEKQSPDYKSNAVDGQWGCWSSWSTCDATYKRSRTRECNNPAPQRGGKRCEGEKRQEEDCTFSIMENNGQPCINDDEEMKEVDLPEIEADSGCPQPVPPENGFIRNEKQLYLVGEDVEISCLTGFETVGYQYFRCLPDGTWRQGDVECQRTECIKPVVQEVLTITPFQRLYRIGESIELTCPKGFVVAGPSRYTCQGNSWTPPISNSLTCEKDTLTKLKGHCQLGQKQSGSECICMSPEEDCSHHSEDLCVFDTDSNDYFTSPACKFLAEKCLNNQQLHFLHIGSCQDGRQLEWGLERTRLSSNSTKKESCGYDTCYDWEKCSASTSKCVCLLPPQCFKGGNQLYCVKMGSSTSEKTLNICEVGTIRCANRKMEILHPGKCLA

SEQ ID NO: 316 - protein, 843 aa, Homo sapiens
MKVISLFILVGFIGEFQSFSSASSPVNCQWDFYAPWSECNGCTKTQTRRRSVAVYGQYGGQPCVGNAFETQSCEPTRGCPTEEGCGERFRCFSGQCISKSLVCNGDSDCDEDSADEDRCEDSERRPSCDIDKPPPNIELTGNGYNELTGQFRNRVINTKSFGGQCRKVFSGDGKDFYRLSGNVLSYTFQVKINNDFNYEFYNSTWSYVKHTSTEHTSSSRKRSFFRSSSSSSRSYTSHTNEIHKGKSYQLLVVENTVEVAQFINNNPEFLQLAEPFWKELSHLPSLYDYSAYRRLIDQYGTHYLQSGSLGGEYRVLFYVDSEKLKQNDFNSVEEKKCKSSGWHFVVKFSSHGCKELENALKAASGTQNNVLRGEPFIRGGGAGFISGLSYLELDNPAGNKRRYSAWAESVTNLPQVIKQKLTPLYELVKEVPCASVKKLYLKWALEEYLDEFDPCHCRPCQNGGLATVEGTHCLCHCKPYTFGAACEQGVLVGNQAGGVDGGWSCWSSWSPCVQGKKTRSRECNNPPPSGGGRSCVGETTESTQCEDEELEHLRLLEPHCFPLSLVPTEFCPSPPALKDGFVQDEGTMFPVGKNVVYTCNEGYSLIGNPVARCGEDLRWLVGEMHCQKIACVLPVLMDGIQSHPQKPFYTVGEKVTVSCSGGMSLEGPSAFLCGSSLKWSPEMKNARCVQKENPLTQAVPKCQRWEKLQNSRCVCKMPYECGPSLDVCAQDERSKRILPLTVCKMHVLHCQGRNYTLTGRDSCTLPASAEKACGACPLWGKCDAESSKCVCREASECEEEGFSICVEVNGKEQTMSECEAGALRCRGQSISVTSIRPCAAETQ

SEQ ID NO: 317 - protein, 584 aa, Homo sapiens
MFAVVFFILSLMTCQPGVTAQEKVNQRVRRAATPAAVTCQLSNWSEWTDCFPCQDKKYRHRSLLQPNKFGGTICSGDIWDQASCSSSTTCVRQAQCGQDFQCKETGRCLKRHLVCNGDQDCLDGSDEDDCEDVRAIDEDCSQYEPIPGSQKAALGYNILTQEDAQSVYDASYYGGQCETVYNGEWRELRYDSTCERLYYGDDEKYFRKPYNFLKYHFEALADTGISSEFYDNANDLLSKVKKDKSDSFGVTIGIGPAGSPLLVGVGVSHSQDTSFLNELNKYNEKKFIFTRIFTKVQTAHFKMRKDDIMLDEGMLQSLMELPDQYNYGMYAKFINDYGTHYITSGSMGGIYEYILVIDKAKMESLGITSRDITTCFGGSLGIQYEDKINVGGGLSGDHCKKFGGGKTERARKAMAVEDIISRVRGGSSGWSGGLAQNRSTITYRSWGRSLKYNPVVIDFEMQPIHEVLRHTSLGPLEAKRQNLRRALDQYLMEFNACRCGPCFNNGVPILEGTSCRCQCRLGSLGAACEQTQTEGAKADGSWSCWSSWSVCRAGIQERRRECDNPAPQNGGASCPGRKVQTQAC

SEQ ID NO: 318 - protein, 591 aa, Homo sapiens
MKNSRTWAWRAPVELFLLCAALGCLSLPGSRGERPHSFGSNAVNKSFAKSRQMRSVDVTLMPIDCELSSWSSWTTCDPCQKKRYRYAYLLQPSQFHGEPCNFSDKEVEDCVTNRPCRSQVRCEGFVCAQTGRCVNRRLLCNGDNDCGDQSDEANCRRIYKKCQHEMDQYWGIGSLASGINLFTNSFEGPVLDHRYYAGGCSPHYILNTRFRKPYNVESYTPQTQGKYEFILKEYESYSDFERNVTEKMASKSGFSFGFKIPGIFELGISSQSDRGKHYIRRTKRFSHTKSVFLHARSDLEVAHYKLKPRSLMLHYEFLQRVKRLPLEYSYGEYRDLFRDFGTHYITEAVLGGIYEYTLVMNKEAMERGDYTLNNVHACAKNDFKIGGAIEEVYVSLGVSVGKCRGILNEIKDRNKRDTMVEDLVVLVRGGASEHITTLAYQELPTADLMQEWGDAVQYNPAIIKVKVEPLYELVTATDFAYSSTVRQNMKQALEEFQKEVSSCHCAPCQGNGVPVLKGSRCDCICPVGSQGLACEVSYRKNTPIDGKWNCWSNWSSCSGRRKTRQRQCNNPPPQNGGSPCSGPASETLDCS

SEQ ID NO: 319 - protein, 202 aa, Homo sapiens
MLPPGTATLLTLLLAAGSLGQKPQRPRRPASPISTIQPKANFDAQQFAGTWLLVAVGSACRFLQEQGHRAEATTLHVAPQGTAMAVSTFRKLDGICWQVRQLYGDTGVLGRFLLQARGARGAVHVVVAETDYQSFAVLYLERAGQLSVKLYARSLPVSDSVLSGFEQRVQEAHLTEDQIFYFPKYGFCEAADQFHVLDEVRR

SEQ ID NO: 320 - protein, 559 aa, Homo sapiens
MSACRSFAVAICILEISILTAQYTTSYDPELTESSGSASHIDCRMSPWSEWSQCDPCLRQMFRSRSIEVFGQFNGKRCTDAVGDRRQCVPTEPCEDAEDDCGNDFQCSTGRCIKMRLRCNGDNDCGDFSDEDDCESEPRPPCRDRVVEESELARTAGYGINILGMDPLSTPFDNEFYNGLCNRDRDGNTLTYYRRPWNVASLIYETKGEKNFRTEHYEEQIEAFKSIIQEKTSNFNAAISLKFTPTETNKAEQCCEETASSISLHGKGSFRFSYSKNETYQLFLSYSSKKEKMFLHVKGEIHLGRFVMRNRDVVLTTTFVDDIKALPTTYEKGEYFAFLETYGTHYSSSGSLGGLYELIYVLDKASMKRKGVELKDIKRCLGYHLDVSLAFSEISVGAEFNKDDCVKRGEGRAVNITSENLIDDVVSLIRGGTRKYAFELKEKLLRGTVIDVTDFVNWASSINDAPVLISQKLSPIYNLVPVKMKNAHLKKQNLERAIEDYINEFSVRKCHTCQNGGTVILMDGKCLCACPFKFEGIACEISKQKISEGLPALEFPNEK

SEQ ID NO: 321 - protein, 2039 aa, Homo sapiens
MGASSPRSPEPVGPPAPGLPFCCGGSLLAVVVLLALPVAWGQCNAPEWLPFARPTNLTDEFEFPIGTYLNYECRPGYSGRPFSIICLKNSVWTGAKDRCRRKSCRNPPDPVNGMVHVIKGIQFGSQIKYSCTKGYRLIGSSSATCIISGDTVIWDNETPICDRIPCGLPPTITNGDFISTNRENFHYGSVVTYRCNPGSGGRKVFELVGEPSIYCTSNDDQVGIWSGPAPQCIIPNKCTPPNVENGILVSDNRSLFSLNEVVEFRCQPGFVMKGPRRVKCQALNKWEPELPSCSRVCQPPPDVLHAERTQRDKDNFSPGQEVFYSCEPGYDLRGAASMRCTPQGDWSPAAPTCEVKSCDDFMGQLLNGRVLFPVNLQLGAKVDFVCDEGFQLKGSSASYCVLAGMESLWNSSVPVCEQIFCPSPPVIPNGRHTGKPLEVFPFGKAVNYTCDPHPDRGTSFDLIGESTIRCTSDPQGNGVWSSPAPRCGILGHCQAPDHFLFAKLKTQTNASDFPIGTSLKYECRPEYYGRPFSITCLDNLVWSSPKDVCKRKSCKTPPDPVNGMVHVITDIQVGSRINYSCTTGHRLIGHSSAECILSGNAAHWSTKPPICQRIPCGLPPTIANGDFISTNRENFHYGSVVTYRCNPGSGGRKVFELVGEPSIYCTSNDDQVGIWSGPAPQCIIPNKCTPPNVENGILVSDNRSLFSLNEVVEFRCQPGFVMKGPRRVKCQALNKWEPELPSCSRVCQPPPDVLHAERTQRDKDNFSPGQEVFYSCEPGYDLRGAASMRCTPQGDWSPAAPTCEVKSCDDFMGQLLNGRVLFPVNLQLGAKVDFVCDEGFQLKGSSASYCVLAGMESLWNSSVPVCEQIFCPSPPVIPNGRHTGKPLEVFPFGKAVNYTCDPHPDRGTSFDLIGESTIRCTSDPQGNGVWSSPAPRCGILGHCQAPDHFLFAKLKTQTNASDFPIGTSLKYECRPEYYGRPFSITCLDNLVWSSPKDVCKRKSCKTPPDPVNGMVHVITDIQVGSRINYSCTTGHRLIGHSSAECILSGNTAHWSTKPPICQRIPCGLPPTIANGDFISTNRENFHYGSVVTYRCNLGSRGRKVFELVGEPSIYCTSNDDQVGIWSGPAPQCIIPNKCTPPNVENGILVSDNRSLFSLNEVVEFRCQPGFVMKGPRRVKCQALNKWEPELPSCSRVCQPPPEILHGEHTPSHQDNFSPGQEVFYSCEPGYDLRGAASLHCTPQGDWSPEAPRCAVKSCDDFLGQLPHGRVLFPLNLQLGAKVSFVCDEGFRLKGSSVSHCVLVGMRSLWNNSVPVCEHIFCPNPPAILNGRHTGTPSGDIPYGKEISYTCDPHPDRGMTFNLIGESTIRCTSDPHGNGVWSSPAPRCELSVRAGHCKTPEQFPFASPTIPINDFEFPVGTSLNYECRPGYFGKMFSISCLENLVWSSVEDNCRRKSCGPPPEPFNGMVHINTDTQFGSTVNYSCNEGFRLIGSPSTTCLVSGNNVTWDKKAPICEIISCEPPPTISNGDFYSNNRTSFHNGTVVTYQCHTGPDGEQLFELVGERSIYCTSKDDQVGVWSSPPPRCISTNKCTAPEVENAIRVPGNRSFFSLTEIIRFRCQPGFVMVGSHTVQCQTNGRWGPKLPHCSRVCQPPPEILHGEHTLSHQDNFSPGQEVFYSCEPSYDLRGAASLHCTPQGDWSPEAPRCTVKSCDDFLGQLPHGRVLLPLNLQLGAKVSFVCDEGFRLKGRSASHCVLAGMKALWNSSVPVCEQIFCPNPPAILNGRHTGTPFGDIPYGKEISYACDTHPDRGMTFNLIGESSIRCTSDPQGNGVWSSPAPRCELSVPAACPHPPKIQNGHYIGGHVSLYLPGMTISYTCDPGYLLVGKGFIFCTDQGIWSQLDHYCKEVNCSFPLFMNGISKELEMKKVYHYGDYVTLKCEDGYTLEGSPWSQCQADDRWDPPLAKCTSRAHDALIVGTLSGTIFFILLIIFLSWIILKHRKGNNAHENPKEVAIHLHSQGGSSVHPRTLQTNEENSRVLP

SEQ ID NO: 322 - protein, 1033 aa, Homo sapiens [sequence omitted]

SEQ ID NO: 323 - protein, 381 aa, Homo sapiens
MTVARPSVPAALPLLGELPRLLLLVLLCLPAVWGDCGLPPDVPNAQPALEGRTSFPEDTVITYKCEESFVKIPGEKDSVICLKGSQWSDIEEFCNRSCEVPTRLNSASLKQPYITQNYFPVGTVVEYECRPGYRREPSLSPKLTCLQNLKWSTAVEFCKKKSCPNPGEIRNGQIDVPGGILFGATISFSCNTGYKLFGSTSSFCLISGSSVQWSDPLPECREIYCPAPPQIDNGIIQGERDHYGYRQSVTYACNKGFTMIGEHSIYCTVNNDEGEWSGPPPECRGKSLTSKVPPTVQKPTTVNVPTTEVSPTSQKTTTKTTTPNAQATRSTPVSRTTKHFHETTPNKGSGTTSGTTRLLSGHTCFTLTGLLGTLVTMGLLT

SEQ ID NO: 324 - protein, 500 aa, Homo sapiens
MASRLTLLTLLLLLLAGDRASSNPNATSSSSQDPESLQDRGEGKVATTVISKMLFVEPILEVSSLPTTNSTTNSATKITANTTDEPTTQPTTEPTTQPTIQPTQPTTQLPTDSPTQPTTGSFCPGPVTLCSDLESHSTEAVLGDALVDFSLKLYHAFSAMKKVETNMAFSPFSIASLLTQVLLGAGENTKTNLESILSYPKDFTCVHQALKGFTTKGVTSVSQIFHSPDLAIRDTFVNASRTLYSSSPRVLSNNSDANLELINTWVAKNTNNKISRLLDSLPSDTRLVLLNAIYLSAKWKTTFDPKKTRMEPFHFKNSVIKVPMMNSKKYPVAHFIDQTLKAKVGQLQLSHNLSLVILVPQNLKHRLEDMEQALSPSVFKAIMEKLEMSKFQPTLLTLPRIKVTTSQDMLSIMEKLEFFDFSYDLNLCGLTEDPDLQVSAMQHQTVLELTETGVEAAAASAISVARTLLVFEVQQPFLFVLWDQQHKFPVFMGRVYDPRA

SEQ ID NO: 325 - DNA, 4353 bp, Homo sapiens
gaagtcagccacacaggataaaggagggaagggaaggagcagatcttttcggtaggaagacagattttgttgtcaggttcctgggagtgcaagagcaagtcaaaggagagagagaggagagaggaaaagccagagggagagagggggagaggggatctgttgcaggcaggggaaggcgtgacctgaatggagaatgccagccaattccagagacacacagggacctcagaacaaagataaggcatcacggacaccacaccgggcacgagctcacaggcaagtcaagctgggaggaccaaggccgggcagccgggagcacccaaggcaggaaaatgaggtggctgcttctctattatgctctgtgcttctccctgtcaaaggcttcagcccacaccgtggagctaaacaatatgtttggccagatccagtcgcctggttatccagactcctatcccagtgattcagaggtgacttggaatatcactgtcccagatgggtttcggatcaagctttacttcatgcacttcaacttggaatcctcctacctttgtgaatatgactatgtgaaggtagaaactgaggaccaggtgctggcaaccttctgtggcagggagaccacagacacagagcagactcccggccaggaggtggtcctctcccctggctccttcatgtccatcactttccggtcagatttctccaatgaggagcgtttcacaggctttgatgcccactacatggctgtggatgtggacgagtgcaaggagagggaggacgaggagctgtcctgtgaccactactgccacaactacattggcggctactactgctcctgccgcttcggctacatcctccacacagacaacaggacctgccgagtggagtgcagtgacaacctcttcactcaaaggactggggtgatcaccagccctgacttcccaaacccttaccccaagagctctgaatgcctgtataccatcgagctggaggagggtttcatggtcaacctgcagtttgaggacatatttgacattgaggaccatcctgaggtgccctgcccctatgactacatcaagatcaaagttggtccaaaagttttggggcctttctgtggagagaaagccccagaacccatcagcacccagagccacagtgtcctgatcctgttccatagtgacaactcgggagagaaccggggctggaggctctcatacagggctgcaggaaatgagtgcccagagctacagcctcctgtccatgggaaaatcgagccctcccaagccaagtatttcttcaaagaccaagtgctcgtcagctgtgacacaggctacaaagtgctgaaggataatgtggagatggacacattccagattgagtgtctgaaggatgggacgtggagtaacaagattcccacctgtaaaattgtagactgtagagccccaggagagctggaacacgggctgatcaccttctctacaaggaacaacctcaccacatacaagtctgagatcaaatactcctgtcaggagccctattacaagatgctcaacaataacacaggtatatatacctgttctgcccaaggagtctggatgaataaagtattggggagaagcctacccacctgccttccagtgtgtgggctccccaagttctcccggaagctgatggccaggatcttcaatggacgcccagcccagaaaggcaccactccctggattgccatgctgtcacacctgaatgggcagcccttctgcggaggctcccttctaggctccagctggatcgtgaccgccgcacactgcctccaccagtcactcgatccggaagatccgaccctacgtgattcagacttgctcagcccttctgacttcaaaatcatcctgggcaagcattggaggctccggtcagatgaaaatgaacagcatctcggcgtcaaacacaccactctccacccccagtatgatcccaacacattcgagaatgacgtggctctggtggagctgttggagagcccagtgctgaatgccttcgtgatgcccatctgtctgcctgagggaccccagcaggaaggagccatggtcatcgtcagcggctgggggaagcagttcttgcaaaggttcccagagaccctgatggagattgaaatcccgattgttgaccacagcacctgccagaaggcttatgccccgctgaagaagaaagtgaccagggacatgatctgtgctggggagaaggaagggggaaaggacgcctgtgcgggtgactctggaggccccatggtgaccctgaatagagaaagaggccagtggtacctggtgggcactgtgtcctggggtgatgactgtgggaagaaggaccgctacggagtatactcttacatccaccacaacaaggactggatccagagggtcaccggagtgaggaactgaatttggctcctcagccccagcaccaccagctgtgggcagtcagtagcagaggacgatcctccgatgaaagcagccatttctcctttccttcctcccatcccccctccttcggcctatccattactgggcaatagagcaggtatcttcacccccttttcactctctttaaagagatggagcaagagagtggtcagaacacaggccgaatccaggctctatcacttactagtttgcagtgctgggcaggtgacttcatctcttcgaacttcagtttcttcataagatggaaatgctataccttacctacctcgtaaaagtctgatgaggaaaagattaactaatagatgcatagcacttaacagagtgcatagcatacactgttttcaataaatgcaccttagcagaaggtcgatgtgtctaccaggcagacgaagctctcttacaaacccctgcctgggtcttagcattgatcagtgacacacctctcccctcaaccttgaccatctccatctgcccttaaatgctgtatgcttttttgccaccgtgcaacttgcccaacatcaatcttcaccctcatccctaaaaaagtaaaacagacaaggttctgagtcctgtggtatgtcccctagcaaatgtaactaggaacatgcactagatgacagattgcgggagggcctgagagaagcagggacaggagggagcctggggattgtggtttgggaaggcagacacctggttctagaactagctctgcccttagccccctgtatgaccctatgcaagtcctcctccctcatctcaaagggtcctcaaagctctgacgatctaagatacaatgaagccattttccccctgataagatgaggtaaagccaatgtaaccaaaaggcaaaaattacaatcggttcaaaggaactttgatgcagacaaaatgctgctgctgctgctcctgaaatacccacccctttccactacgggtgggttcccaaggacatgggacaggcaaagtgtgagccaaaggatccttccttattcctaagcagagcatctgctctgggccctggcctccttcccttcttgggaaactgggctgcatgaggtgggccctggtagtttgtaccccaggcccctatactcttccttcctatgtccacagctgaccccaagcagccgttccccgactcctcacccctgagcctcaccctgaactccctcatcttgcaaggccataagtgttttccaagcaaaatgcctctcccatcctctctcaggaagcttctagagactttatgccctccagagctccaagatataagccctccaagggatcagaagctccaagttcctgtcttctgttttatagaaattgatcttccctgggggactttaactcttgacctgtatgcagctgttggagtaattccaggtctcttgaaaaaaaagaggaagataatggagaatgagaacatatatatatatatattaagccccaggctgaatactcagggacagcaattcacagcctgcctctggttctataaacaagtcattctacctctttgtgccctgctgtttattctgtaaggggaaggtggcaatgggacccagctccatcagacacttgtcaagctagcagaaactccattttcaatgccaaagaagaactgtaatgctgttttggaatcatcccaaggcatcccaagacaccatatcttcccatttcaagcactgcctgggcacaccccaacatcccaggctgtggtggctcctgtgggaactacctagatgaagagagtatcatttataccttctaggagctcctattgggagacatgaaacatatgtaattgactaccatgtaatagaacaaaccctgccaagtgctgctttggaaagtcatggaggtaaaagaaagaccattc

SEQ ID NO: 326 - protein, 699 aa, Homo sapiens
MRWLLLYYALCFSLSKASAHTVELNNMFGQIQSPGYPDSYPSDSEVTWNITVPDGFRIKLYFMHFNLESSYLCEYDYVKVETEDQVLATFCGRETTDTEQTPGQEVVLSPGSFMSITFRSDFSNEERFTGFDAHYMAVDVDECKEREDEELSCDHYCHNYIGGYYCSCRFGYILHTDNRTCRVECSDNLFTQRTGVITSPDFPNPYPKSSECLYTIELEEGFMVNLQFEDIFDIQDHPEVPCPYDYIKIKVGPKVLGPFCGEKAPEPISTQSHSVLILFHSDNSAENRGWRLSYRAAGNECPELQPPVHGKIEPSQAKYFFKDQVLVSCDTGYKVLKDNVEMDTFQIECLKDGTWSNKIPTCKIVDCRAPGELEHGLITFSTRNNLTTYKSEIKYSCQEPYYKMLNNNTGIYTCSAQGVWMNKVLGRSLPTCLPVCGLPKFSRKLMARIFNGRPAQKGTTPWIAMLSHLNGQPFCGGSLLGSSWIVTAAHCLHQSLDPKDPTLRDSDLLSPSDFKIILGKHWRLRSDENEQHLGVKHTTLHPQYDPNTFENDVALVELLESPVLNAFVMPICLPEGPQQEGAMVIVSGWGKQFLQRFPETLMEIEIPIVDHSTCQKAYAPLKKKVTRDMICAGEKEGGKDACAGDSGGPMVTLNRERGQWYLVGTVSWGDDCGKKDRYGVYSYIHHNKDWIQRVTGVRN

SEQ ID NO: 327 - DNA, 4137 bp, Homo sapiens
gaagtcagccacacaggataaaggagggaagggaaggagcagatcttttcggtaggaagacagattttgttgtcaggttcctgggagtgcaagagcaagtcaaaggagagagagaggagagaggaaaagccagagggagagagggggagaggggatctgttgcaggcaggggaaggcgtgacctgaatggagaatgccagccaattccagagacacacagggacctcagaacaaagataaggcatcacggacaccacaccgggcacgagctcacaggcaagtcaagctgggaggaccaaggccgggcagccgggagcacccaaggcaggaaaatgaggtggctgcttctctattatgctctgtgcttctccctgtcaaaggcttcagcccacaccgtggagctaaacaatatgtttggccagatccagtcgcctggttatccagactcctatcccagtgattcagaggtgacttggaatatcactgtcccagatgggtttcggatcaagctttacttcatgcacttcaacttggaatcctcctacctttgtgaatatgactatgtgaaggtagaaactgaggaccaggtgctggcaaccttctgtggcagggagaccacagacacagagcagactcccggccaggaggtggtcctctcccctggctccttcatgtccatcactttccggtcagatttctccaatgaggagcgtttcacaggctttgatgcccactacatggctgtggatgtggacgagtgcaaggagagggaggacgaggagctgtcctgtgaccactactgccacaactacattggcggctactactgctcctgccgcttcggctacatcctccacacagacaacaggacctgccgagtggagtgcagtgacaacctcttcactcaaaggactggggtgatcaccagccctgacttcccaaacccttaccccaagagctctgaatgcctgtataccatcgagctggaggagggtttcatggtcaacctgcagtttgaggacatatttgacattgaggaccatcctgaggtgccctgcccctatgactacatcaagatcaaagttggtccaaaagttttggggcctttctgtggagagaaagccccagaacccatcagcacccagagccacagtgtcctgatcctgttccatagtgacaactcgggagagaaccggggctggaggctctcatacagggctgcaggaaatgagtgcccagagctacagcctcctgtccatgggaaaatcgagccctcccaagccaagtatttcttcaaagaccaagtgctcgtcagctgtgacacaggctacaaagtgctgaaggataatgtggagatggacacattccagattgagtgtctgaaggatgggacgtggagtaacaagattcccacctgtaaaattgtagactgtagagccccaggagagctggaacacgggctgatcaccttctctacaaggaacaacctcaccacatacaagtctgagatcaaatactcctgtcaggagccctattacaagatgctcaacaataacacaggtatatatacctgttctgcccaaggagtctggatgaataaagtattggggagaagcctacccacctgccttccagagtgtggtcagccctcccgctccctgccaagcctggtcaagaggatcattgggggccgaaatgctgagcctggcctcttcccgtggcaggccctgatagtggtggaggacacttcgagagtgccaaatgacaagtggtttgggagtggggccctgctctctgcgtcctggatcctcacagcagctcatgtgctgcgctcccagcgtagagacaccacggtgataccagtctccaaggagcatgtcaccgtctacctgggcttgcatgatgtgcgagacaaatcgggggcagtcaacagctcagctgcccgagtggtgctccacccagacttcaacatccaaaactacaaccacgatatagctctggtgcagctgcaggagcctgtgcccctgggaccccacgttatgcctgtctgcctgccaaggcttgagcctgaaggcccggccccccacatgctgggcctggtggccggctggggcatctccaatcccaatgtgacagtggatgagatcatcagcagtggcacacggaccttgtcagatgtcctgcagtatgtcaagttacccgtggtgcctcacgctgagtgcaaaactagctatgagtcccgctcgggcaattacagcgtcacggagaacatgttctgtgctggctactacgagggcggcaaagacacgtgccttggagatagcggtggggcctttgtcatctttgatgacttgagccagcgctgggtggtgcaaggcctggtgtcctgggggggacctgaagaatgcggcagcaagcaggtctatggagtctacacaaaggtctccaattacgtggactgggtgtgggagcagatgggcttaccacaaagtgttgtggagccccaggtggaacggtgagctgacttacttcctcggggcctgcctcccctgagcgaagctacaccgcacttccgacagcacactccacattacttatcagaccatatggaatggaacacactgacctagcggtggcttctcctaccgagacagcccccaggaccctgagaggcagagtgtggtatagggaaaaggctccaggcaggagacctgtgttcctgagcttgtccaagtctctttccctgtctgggcctcactctaccgagtaatacaatgcaggagctcaaccaaggcctctgtgccaatcccagcactcctttccaggccatgcttcttaccccagtggcctttattcactcctgaccacttatcaaacccatcggtcctactgttggtataactgagcttggacctgactattagaaaatggtttctaacattgaactgaatgccgcatctgtatattttcctgctctgccttctgggactagccttggcctaatccttcctctaggagaagagcattcaggttttgggagatggctcatagccaagcccctctctcttagtgtgatcccttggagcaccttcatgcctggggtttctctcccaaaagcttcttgcagtctaagccttatcccttatgttccccattaaaggaatttcaaaagacatggagaaagttgggaaggtttgtgctgactgctgggagcagaatagccgtgggaggcccaccaagcccttaaattcccattgtcaactcagaacacatttgggcccatatgccaccctggaacaccagctgacaccatgggcgtccacacctgctgctccagacaagcacaaagcaatctttcagccttgaaatgtattatctgaaaggctacctgaagcccaggcccgaatatggggacttagtcgattacctggaaaaagaaaagacccacactgtgtcctgctgtgcttttgggcaggaaaatggaagaaagagtggggtgggcacattagaagtcacccaaatcctgccaggctgcctggcatccctggggcatgagctgggcggagaatccaccccgcaggatgttcagagggacccactccttcatttttcagagtcaaaggaatcagaggctcacccatggcaggcagtgaaaagagccaggagtcctgggttctagtccctgctctgcccccaactggctgtataacctttgaaaaatcattttctttgtctgagtctctggttctccgtcagcaacaggctggcataaggtcccctgcaggttccttctagctggagcactcagagcttccctgactgctagcagcctctctggccctcacagggctgattgttctccttctccctggagctctctctcctgaaaatctccatcagagcaaggcagccagagaagcccctgagagggaatgattgggaagtgtccactttctcaaccggctcatcaaacacactcctttgtctatgaatggcacatgtaaatgatgttatattttgtatcttttatatcatatgcttcaccattctgtaaagggcctctgcattgttgctcccatcaggggtctcaagtggaaataaaccctcgtggataaccaaaaaaaaaaaaaaaaaaaa

SEQ ID NO: 328 - protein, 728 aa, Homo sapiens; identical to SEQ ID NO: 136

SEQ ID NO: 329 - DNA, 2072 bp, Homo sapiens
gaagtcagccacacaggataaaggagggaagggaaggagcagatcttttcggtaggaagacagattttgttgtcaggttcctgggagtgcaagagcaagtcaaaggagagagagaggagagaggaaaagccagagggagagagggggagaggggatctgttgcaggcaggggaaggcgtgacctgaatggagaatgccagccaattccagagacacacagggacctcagaacaaagataaggcatcacggacaccacaccgggcacgagctcacaggcaagtcaagctgggaggaccaaggccgggcagccgggagcacccaaggcaggaaaatgaggtggctgcttctctattatgctctgtgcttctccctgtcaaaggcttcagcccacaccgtggagctaaacaatatgtttggccagatccagtcgcctggttatccagactcctatcccagtgattcagaggtgacttggaatatcactgtcccagatgggtttcggatcaagctttacttcatgcacttcaacttggaatcctcctacctttgtgaatatgactatgtgaaggtagaaactgaggaccaggtgctggcaaccttctgtggcagggagaccacagacacagagcagactcccggccaggaggtggtcctctcccctggctccttcatgtccatcactttccggtcagatttctccaatgaggagcgtttcacaggctttgatgcccactacatggctgtggatgtggacgagtgcaaggagagggaggacgaggagctgtcctgtgaccactactgccacaactacattggcggctactactgctcctgccgcttcggctacatcctccacacagacaacaggacctgccgagtggagtgcagtgacaacctcttcactcaaaggactggggtgatcaccagccctgacttcccaaacccttaccccaagagctctgaatgcctgtataccatcgagctggaggagggtttcatggtcaacctgcagtttgaggacatatttgacattgaggaccatcctgaggtgccctgcccctatgactacatcaagatcaaagttggtccaaaagttttggggcctttctgtggagagaaagccccagaacccatcagcacccagagccacagtgtcctgatcctgttccatagtgacaactcgggagagaaccggggctggaggctctcatacagggctgcaggaaatgagtgcccagagctacagcctcctgtccatgggaaaatcgagccctcccaagccaagtatttcttcaaagaccaagtgctcgtcagctgtgacacaggctacaaagtgctgaaggataatgtggagatggacacattccagattgagtgtctgaaggatgggacgtggagtaacaagattcccacctgtaaaaaaaatgaaatcgatctggagagcgaactcaagtcagagcaagtgacagagtgaatgacgggaccccacacaatgcagacatccagaaatggatcactcccaagacccctggggcccagagctgcaccacccctccccacccacaacacccccgtgcccctttccatgtggattagaatgggtgctgaacaacatgatctcagcagttgaagctgctacgtgtgtgaaagcaaattctccacttgagggtttgcccatcattcaaacactattccagaaaataatgaaaaaaaaatgtgggatttattttagcacctctgagtggactgtacttttctcaacggaaaaaaaaaatgcccttggtccttgagacaaaagatttaatatacaaccatgtggcctcaggctgaccagatcaaagtggtttctaatccattctacatgtcaagtttaaatgaaccagactgcctgtgactttatgaatctgaaggtattacctgttgctgctttcttaaccaccatgagtaggtaaagcaaataataactcacagagtgtggatttttgagaaaaaaaaaaaaaaaaaaaaaaaaaaaaaaaaaaaaaaaaaaaaaaaaaaaaaaaaaaaaaaaaaaaaaaaaaaaaaaaaaaaa

SEQ ID NO: 330 - protein, 380 aa, Homo sapiens
MRWLLLYYALCFSLSKASAHTVELNNMFGQIQSPGYPDSYPSDSEVTWNITVPDGFRIKLYFMHFNLESSYLCEYDYVKVETEDQVLATFCGRETTDTEQTPGQEVVLSPGSFMSITFRSDFSNEERFTGFDAHYMAVDVDECKEREDEELSCDHYCHNYIGGYYCSCRFGYILHTDNRTCRVECSDNLFTQRTGVITSPDFPNPYPKSSECLYTIELEEGFMVNLQFEDIFDIEDHPEVPCPYDYIKIKVGPKVLGPFCGEKAPEPISTQSHSVLILFHSDNSGENRGWRLSYRAAGNECPELQPPVHGKIEPSQAKYFFKDQVLVSCDTGYKVLKDNVEMDTFQIECLKDGTWSNKIPTCKKNEIDLESELKSEQVTE

SEQ ID NO: 331 - DNA, 2460 bp, Homo sapiens
ggccagctggacgggcacaccatgaggctgctgaccctcctgggccttctgtgtggctcggtggccacccccttgggcccgaagtggcctgaacctgtgttcgggcgcctggcatcccccggctttccaggggagtatgccaatgaccaggagcggcgctggaccctgactgcaccccccggctaccgcctgcgcctctacttcacccacttcgacctggagctctcccacctctgcgagtacgacttcgtcaagctgagctcgggggccaaggtgctggccacgctgtgcgggcaggagagcacagacacggagcgggcccctggcaaggacactttctactcgctgggctccagcctggacattaccttccgctccgactactccaacgagaagccgttcacggggttcgaggccttctatgcagccgaggacattgacgagtgccaggtggccccgggagaggcgcccacctgcgaccaccactgccacaaccacctgggcggtttctactgctcctgccgcgcaggctacgtcctgcaccgtaacaagcgcacctgctcagccctgtgctccggccaggtcttcacccagaggtctggggagctcagcagccctgaatacccacggccgtatcccaaactctccagttgcacttacagcatcagcctggaggaggggttcagtgtcattctggactttgtggagtccttcgatgtggagacacaccctgaaaccctgtgtccctacgactttctcaagattcaaacagacagagaagaacatggcccattctgtgggaagacattgccccacaggattgaaacaaaaagcaacacggtgaccatcacctttgtcacagatgaatcaggagaccacacaggctggaagatccactacacgagcacagcgcagccttgcccttatccgatggcgccacctaatggccacgtttcacctgtgcaagccaaatacatcctgaaagacagcttctccatcttttgcgagactggctatgagcttctgcaaggtcacttgcccctgaaatcctttactgcagtttgtcagaaagatggatcttgggaccggccaatgcccgcgtgcagcattgttgactgtggccctcctgatgatctacccagtggccgagtggagtacatcacaggtcctggagtgaccacctacaaagctgtgattcagtacagctgtgaagagaccttctacacaatgaaagtgaatgatggtaaatatgtgtgtgaggctgatggattctggacgagctccaaaggagaaaaatcactcccagtctgtgagcctgtttgtggactatcagcccgcacaacaggagggcgtatatatggagggcaaaaggcaaaacctggtgattttccttggcaagtcctgatattaggtggaaccacagcagcaggtgcacttttatatgacaactgggtcctaacagctgctcatgccgtctatgagcaaaaacatgatgcatccgccctggacattcgaatgggcaccctgaaaagactatcacctcattatacacaagcctggtctgaagctgtttttatacatgaaggttatactcatgatgctggctttgacaatgacatagcactgattaaattgaataacaaagttgtaatcaatagcaacatcacgcctatttgtctgccaagaaaagaagctgaatcctttatgaggacagatgacattggaactgcatctggatggggattaacccaaaggggttttcttgctagaaatctaatgtatgtcgacataccgattgttgaccatcaaaaatgtactgctgcatatgaaaagccaccctatccaaggggaagtgtaactgctaacatgctttgtgctggcttagaaagtgggggcaaggacagctgcagaggtgacagcggaggggcactggtgtttctagatagtgaaacagagaggtggtttgtgggaggaatagtgtcctggggttccatgaattgtggggaagcaggtcagtatggagtctacacaaaagttattaactatattccctggatcgagaacataattagtgatttttaacttgcgtgtctgcagtcaaggattcttcatttttagaaatgcctgtgaagaccttggcagcgacgtggctcgagaagcattcatcattactgtggacatggcagttgttgctccacccaaaaaaacagactccaggtgaggctgctgtcatttctccacttgccagtttaattccagccttacccattgactcaaggggacataaaccacgagagtgacagtcatctttgcccacccagtgtaatgtcactgctcaaattacatttcattaccttaaaaagccagtctcttttcatactggctgttggcatttctgtaaactgcctgtccatgctctttgtttttaaacttgttcttattgaaaaaaaaaaaaaaaaa

SEQ ID NO: 332 - protein, 686 aa, Homo sapiens [sequence omitted]

SEQ ID NO: 333 - DNA, 738 bp, Homo sapiens
ggccagctggacgggcacaccatgaggctgctgaccctcctgggccttctgtgtggctcggtggccacccccttgggcccgaagtggcctgaacctgtgttcgggcgcctggcatcccccggctttccaggggagtatgccaatgaccaggagcggcgctggaccctgactgcaccccccggctaccgcctgcgcctctacttcacccacttcgacctggagctctcccacctctgcgagtacgacttcgtcaagctgagctcgggggccaaggtgctggccacgctgtgcgggcaggagagcacagacacggagcgggcccctggcaaggacactttctactcgctgggctccagcctggacattaccttccgctccgactactccaacgagaagccgttcacggggttcgaggccttctatgcagccgaggacattgacgagtgccaggtggccccgggagaggcgcccacctgcgaccaccactgccacaaccacctgggcggtttctactgctcctgccgcgcaggctacgtcctgcaccgtaacaagcgcacctgctcagagcagagcctctagcctcccctggagctccggcctgcccagcaggtcagaagccagagccagcctgctggcctcagctccgggttgggctgagatggctgtgccccaactcccattcacccaccatggacccaataataaacctggccccaccccaaaaaaaaaaaaaaaaaa

SEQ ID NO: 334 - protein, 185 aa, Homo sapiens
MRLLTLLGLLCGSVATPLGPKWPEPVFGRLASPGFPGEYANDQERRWTLTAPPGYRLRLYFTHFDLELSHLCEYDFVKLSSGAKVLATLCGQESTDTERAPGKDTFYSLGSSLDITFRSDYSNEKPFTGFEAFYAAEDIDECQVAPGEAPTCDHHCHNHLGGFYCSCRAGYVLHRNKRTCSEQSL

SEQ ID NO: 335 - protein, 248 aa, Homo sapiens
MSLFPSLPLLLLSMVAASYSETVTCEDAQKTCPAVIACSSPGINGFPGKDGRDGTKGEKGEPGQGLRGLQGPPGKLGPPGNPGPSGSPGPKGQKGDPGKSPDGDSSLAASERKALQTEMARIKKWLTFSLGKQVGNKFFLTNGEIMTFEKVKALCVKFQASVATPRNAAENGAIQNLIKEEAFLGITDEKTEGQFVDLTGNRLTYTNWNEGEPNNAGSDEDCVLLLKNGQWNDVPCSTSHLAVCEFPI

SEQ ID NO: 336 - protein, 392 aa, Homo sapiens [sequence omitted]

SEQ ID NO: 337 - DNA, 2574 bp, Homo sapiens
ttggatgttccgggaaagtgatgtgggtaggacaggcggggcgagccgcaggtgccagaacacagattgtataaaaggctgggggctggtggggagcaggggaagggaatgtgaccaggtctaggtctggagtttcagcttggacactgagccaagcagacaagcaaagcaagccaggacacaccatcctgccccaggcccagcttctctcctgccttccaacgccatggggagcaatctcagcccccaactctgcctgatgccctttatcttgggcctcttgtctggaggtgtgaccaccactccatggtctttggcccggccccagggatcctgctctctggagggggtagagatcaaaggcggctccttccgacttctccaagagggccaggcactggagtacgtgtgtccttctggcttctacccgtaccctgtgcagacacgtacctgcagatctacggggtcctggagcaccctgaagactcaagaccaaaagactgtcaggaaggcagagtgcagagcaatccactgtccaagaccacacgacttcgagaacggggaatactggccccggtctccctactacaatgtgagtgatgagatctctttccactgctatgacggttacactctccggggctctgccaatcgcacctgccaagtgaatggccgatggagtgggcagacagcgatctgtgacaacggagcggggtactgctccaacccgggcatccccattggcacaaggaaggtgggcagccagtaccgccttgaagacagcgtcacctaccactgcagccgggggcttaccctgcgtggctcccagcggcgaacgtgtcaggaaggtggctcttggagcgggacggagccttcctgccaagactccttcatgtacgacacccctcaagaggtggccgaagctttcctgtcttccctgacagagaccatagaaggagtcgatgctgaggatgggcacggcccaggggaacaacagaagcggaagatcgtcctggacccttcaggctccatgaacatctacctggtgctagatggatcagacagcattggggccagcaacttcacaggagccaaaaagtgtctagtcaacttaattgagaaggtggcaagttatggtgtgaagccaagatatggtctagtgacatatgccacataccccaaaatttgggtcaaagtgtctgaagcagacagcagtaatgcagactgggtcacgaagcagctcaatgaaatcaattatgaagaccacaagttgaagtcagggactaacaccaagaaggccctccaggcagtgtacagcatgatgagctggccagatgacgtccctcctgaaggctggaaccgcacccgccatgtcatcatcctcatgactgatggattgcacaacatgggcggggacccaattactgtcattgatgagatccgggacttgctatacattggcaaggatcgcaaaaacccaagggaggattatctggatgtctatgtgtttggggtcgggcctttggtgaaccaagtgaacatcaatgctttggcttccaagaaagacaatgagcaacatgtgttcaaagtcaaggatatggaaaacctggaagatgttttctaccaaatgatcgatgaaagccagtctctgagtctctgtggcatggtttgggaacacaggaagggtaccgattaccacaagcaaccatggcaggccaagatctcagtcattcgcccttcaaagggacacgagagctgtatgggggctgtggtgtctgagtactttgtgctgacagcagcacattgtttcactgtggatgacaaggaacactcaatcaaggtcagcgtaggaggggagaagcgggacctggagatagaagtagtcctatttcaccccaactacaacattaatgggaaaaaagaagcaggaattcctgaattttatgactatgacgttgccctgatcaagctcaagaataagctgaaatatggccagactatcaggcccatttgtctcccctgcaccgagggaacaactcgagctttgaggcttcctccaactaccacttgccagcaacaaaaggaagagctgctccctgcacaggatatcaaagctctgtttgtgtctgaggaggagaaaaagctgactcggaaggaggtctacatcaagaatggggataagaaaggcagctgtgagagagatgctcaatatgccccaggctatgacaaagtcaaggacatctcagaggtggtcacccctcggttcctttgtactggaggagtgagtccctatgctgaccccaatacttgcagaggtgattctggcggccccttgatagttcacaagagaagtcgtttcattcaagttggtgtaatcagctggggagtagtggatgtctgcaaaaaccagaagcggcaaaagcaggtacctgctcacgcccgagactttcacatcaacctctttcaagtgctgccctggctgaaggagaaactccaagatgaggatttgggttttctataaggggtttcctgctggacaggggcgtgggattgaattaaaacagctgcgacaac

SEQ ID NO: 338 - protein, 764 aa, Homo sapiens
MGSNLSPQLCLMPFILGLLSGGVTTTPWSLARPQGSCSLEGVEIKGGSFRLLQEGQALEYVCPSGFYPYPVQTRTCRSTGSWSTLKTQDQKTVRKAECRAIHCPRPHDFENGEYWPRSPYYNVSDEISFHCYDGYTLRGSANRTCQVNGRWSGQTAICDNGAGYCSNPGIPIGTRKVGSQYRLEDSVTYHCSRGLTLRGSQRRTCQEGGSWSGTEPSCQDSFMYDTPQEVAEAFLSSLTETIEGVDAEDGHGPGEQQKRKIVLDPSGSMNIYLVLDGSDSIGASNFTGAKKCLVNLIEKVASYGVKPRYGLVTYATYPKIWVKVSEADSSNADWVTKQLNEINYEDHKLKSGTNTKKALQAVYSMMSWPDDVPPEGWNRTRHVIILMTDGLHNMGGDPITVIDEIRDLLYIGKDRKNPREDYLDVYVFGVGPLVNQVNINALASKKDNEQHVFKVKDMENLEDVFYQMIDESQSLSLCGMVWEHRKGTDYHKQPWQAKISVIRPSKGHESCMGAVVSEYFVLTAAHCFTVDDKEHSIKVSVGGEKRDLEIEVVLFHPNYNINGKKEAGIPEFYDYDVALIKLKNKLKYGQTIRPICLPCTEGTTRALRLPPTTTCQQQKEELLPAQDIKALFVSEEEKKLTRKEVYIKNGDKKGSCERDAQYAPGYDKVKDISEVVTPRFLCTGGVSPYADPNTCRGDSGGPLIVHKRSRFIQVGVISWGVVDVCKNQKRQKQVPAHARDFHINLFQVLPWLKEKLQDEDLGFL

SEQ ID NO: 339 - DNA, 1173 bp, Homo sapiens
gtgtctcagccacagcggcttcaccatgcacagctgggagcgcctggcagttctggtcctcctaggagcggccgcctgcgcggcgccgccccgtggtcggatcctgggcggcagagaggccgaggcgcacgcgcggccctacatggcgtcggtgcagctgaacggcgcgcacctgtgcggcggcgtcctggtggcggagcagtgggtgctgagcgcggcgcactgcctggaggacgcggccgacgggaaggtgcaggttctcctgggcgcgcactccctgtcgcagccggagccctccaagcgcctgtacgacgtgctccgcgcagtgccccacccggacagccagcccgacaccatcgaccacgacctcctgctgctacagctgtcggagaaggccacactgggccctgctgtgcgccccctgccctggcagcgcgtggaccgcgacgtggcaccgggaactctctgcgacgtggccggctggggcatagtcaaccacgcgggccgccgcccggacagcctgcagcacgtgctcttgccagtgctggaccgcgccacctgcaaccggcgcacgcaccacgacggcgccatcaccgagcgcttgatgtgcgcggagagcaatcgccgggacagctgcaagggtgactccgggggcccgctggtgtgcgggggcgtgctcgagggcgtggtcacctcgggctcgcgcgtttgcggcaaccgcaagaagcccgggatctacacccgcgtggcgagctatgcggcctggatcgacagcgtcctggcctagggtgccggggcctgaaggtcagggtcacccaagcaacaaagtcccgagcaatgaagtcatccactcctgcatctggttggtctttattgagcacctactatatgcagaaggggaggccgaggtgggaggatcattggatctcaggagttcgagatcagcatgggccacgtagcgcgactccatctctacaaataaataaaaaattagctgggcaattggcgggcatggaggtgggtgcttgtagttccagctactcaggaggctgaggtgggaggatgacttgaacgcaggaggctgaggctgcagtgagttgtgattgcaccactgccctccagcctgggcaacagagtgaaaccttgtctctctctacaaaaaaaaaaaaaaaa

SEQ ID NO: 340 - protein, 253 aa, Homo sapiens
MHSSVYFAVLVLLGAAACAARPRGRILGGREAEAHARPYMASVQLNGAHLCGGVLVAEQWVLSAAHCLEDAADGKVQVLLGAHSLSQPEPSKRLYDVLRAVPHPDSQPDTIDHDLLLLQLSEKATLGPAVRPLPWQRVDRDVAPGTLCDVAGWGIVNHAGRRPDSLQHVLLPVLDRATCNRRTHHDGAITERLMCAESNRRDSCKGDSGGPLVCGGVLEGVVTSGSRVCGNRKKPGIYTRVASYAAWIDSVLA

SEQ ID NO: 341 - DNA, 4004 bp, Homo sapiens
ccttttgcagcaagttctttcctgcactaatcacaattcttggaagaggagaactggacgttgtgaacagagttagctggtaaatgtcctcttaaaagatccaaaaaatgagacttctagcaaagattatttgccttatgttatgggctatttgtgtagcagaagattgcaatgaacttcctccaagaagaaatacagaaattctgacaggttcctggtctgaccaaacatatccagaaggcacccaggctatctataaatgccgccctggatatagatctcttggaaatgtaataatggtatgcaggaagggagaatgggttgctcttaatccattaaggaaatgtcagaaaaggccctgtggacatcctggagatactccttttggtacttttacccttacaggaggaaatgtgtttgaatatggtgtaaaagctgtgtatacatgtaatgaggggtatcaattgctaggtgagattaattaccgtgaatgtgacacagatggatggaccaatgatattcctatatgtgaagttgtgaagtgtttaccagtgacagcaccagagaatggaaaaattgtcagtagtgcaatggaaccagatcgggaataccattttggacaagcagtacggtttgtatgtaactcaggctacaagattgaaggagatgaagaaatgcattgttcagacgatggtttttggagtaaagagaaaccaaagtgtgtggaaatttcatgcaaatccccagatgttataaatggatctcctatatctcagaagattatttataaggagaatgaacgatttcaatataaatgtaacatgggttatgaatacagtgaaagaggagatgctgtatgcactgaatctggatggcgtccgttgccttcatgtgaagaaaaatcatgtgataatccttatattccaaatggtgactactcacctttaaggattaaacacagaactggagatgaaatcacgtaccagtgtagaaatggtttttatcctgcaacccggggaaatacagcaaaatgcacaagtactggctggatacctgctccgagatgtaccttgaaaccttgtgattatccagacattaaacatggaggtctatatcatgagaatatgcgtagaccatactttccagtagctgtaggaaaatattactcctattactgtgatgaacattttgagactccgtcaggaagttactgggatcacattcattgcacacaagatggatggtcgccagcagtaccatgcctcagaaaatgttattttccttatttggaaaatggatataatcaaaatcatggaagaaagtttgtacagggtaaatctatagacgttgcctgccatcctggctacgctcttccaaaagcgcagaccacagttacatgtatggagaatggctggtctcctactcccagatgcatccgtgtcaaaacatgttccaaatcaagtatagatattgagaatgggtttatttctgaatctcagtatacatatgccttaaaagaaaaagcgaaatatcaatgcaaactaggatatgtaacagcagatggtgaaacatcaggatcaattacatgtgggaaagatggatggtcagctcaacccacgtgcattaaatcttgtgatatcccagtatttatgaatgccagaactaaaaatgacttcacatggtttaagctgaatgacacattggactatgaatgccatgatggttatgaaagcaatactggaagcaccactggttccatagtgtgtggttacaatggttggtctgatttacccatatgttatgaaagagaatgcgaacttcctaaaatagatgtacacttagttcctgatcgcaagaaagaccagtataaagttggagaggtgttgaaattctcctgcaaaccaggatttacaatagttggacctaattccgttcagtgctaccactttggattgtctcctgacctcccaatatgtaaagagcaagtacaatcatgtggtccacctcctgaactcctcaatgggaatgttaaggaaaaaacgaaagaagaatatggacacagtgaagtggtggaatattattgcaatcctagatttctaatgaagggacctaataaaattcaatgtgttgatggagagtggacaactttaccagtgtgtattgtggaggagagtacctgtggagatatacctgaacttgaacatggctgggcccagctttcttcccctccttattactatggagattcagtggaattcaattgctcagaatcatttacaatgattggacacagatcaattacgtgtattcatggagtatggacccaacttccccagtgtgtggcaatagataaacttaagaagtgcaaatcatcaaatttaattatacttgaggaacatttaaaaaacaagaaggaattcgatcataattctaacataaggtacagatgtagaggaaaagaaggatggatacacacagtctgcataaatggaagatgggatccagaagtgaactgctcaatggcacaaatacaattatgcccacctccacctcagattcccaattctcacaatatgacaaccacactgaattatcgggatggagaaaaagtatctgttctttgccaagaaaattatctaattcaggaaggagaagaaattacatgcaaagatggaagatggcagtcaataccactctgtgttgaaaaaattccatgttcacaaccacctcagatagaacacggaaccattaattcatccaggtcttcacaagaaagttatgcacatgggactaaattgagttatacttgtgagggtggtttcaggatatctgaagaaaatgaaacaacatgctacatgggaaaatggagttctccacctcagtgtgaaggccttccttgtaaatctccacctgagatttctcatggtgttgtagctcacatgtcagacagttatcagtatggagaagaagttacgtacaaatgttttgaaggttttggaattgatgggcctgcaattgcaaaatgcttaggagaaaaatggtctcaccctccatcatgcataaaaacagattgtctcagtttacctagctttgaaaatgccatacccatgggagagaagaaggatgtgtataaggcgggtgagcaagtgacttacacttgtgcaacatattacaaaatggatggagccagtaatgtaacatgcattaatagcagatggacaggaaggccaacatgcagagacacctcctgtgtgaatccgcccacagtacaaaatgcttatatagtgtcgagacagatgagtaaatatccatctggtgagagagtacgttatcaatgtaggagcccttatgaaatgtttggggatgaagaagtgatgtgtttaaatggaaactggacggaaccacctcaatgcaaagattctacaggaaaatgtgggccccctccacctattgacaatggggacattacttcattcccgttgtcagtatatgctccagcttcatcagttgagtaccaatgccagaacttgtatcaacttgagggtaacaagcgaataacatgtagaaatggacaatggtcagaaccaccaaaatgcttacatccgtgtgtaatatcccgagaaattatggaaaattataacatagcattaaggtggacagccaaacagaagctttattcgagaacaggtgaatcagttgaatttgtgtgtaaacggggatatcgtctttcatcacgttctcacacattgcgaacaacatgttgggatgggaaactggagtatccaacttgtgcaaaaagatagaatcaatcataaagtgcacacctttattcagaactttagtattaaatcagttctcaatttcattttttatgtattgttttactcctttttattcatacgtaaaattttggattaatttgtgaaaatgtaattataagctgagaccggtggctctcttcttaaaagcaccatattaaatcctggaaaactaaaaaaaaaaaa

SEQ ID NO: 342 - protein, 1231 aa, Homo sapiens
MRLLAKIICLMLWAICVAEDCNELPPRRNTEILTGSWSDQTYPEGTQAIYKCRPGYRSLGNVIMVCRKGEWVALNPLRKCQKRPCGHPGDTPFGTFTLTGGNVFEYGVKAVYTCNEGYQLLGEINYRECDTDGWTNDIPICEVVKCLPVTAPENGKIVSSAMEPDREYHFGQAVRFVCNSGYKIEGDEEMHCSDDGFWSKEKPKCVEISCKSPDVINGSPISQKIIYKENERFQYKCNMGYEYSERGDAVCTESGWRPLPSCEEKSCDNPYIPNGDYSPLRIKHRTGDEITYQCRNGFYPATRGNTAKCTSTGWIPAPRCTLKPCDYPDIKHGGLYHENMRRPYFPVAVGKYYSYYCDEHFETPSGSYWDHIHCTQDGWSPAVPCLRKCYFPYLENGYNQNHGRKFVQGKSIDVACHPGYALPKAQTTVTCMENGWSPTPRCIRVKTCSKSSIDIENGFISESQYTYALKEKAKYQCKLGYVTADGETSGSIRCGKDGWSAQPTCIKSCDIPVFMNARTKNDFTWFKLNDTLDYECHDGYESNTGSTTGSIVCGYNGWSDLPICYERECELPKIDVHLVPDRKKDQYKVGEVLKFSCKPGFTIVGPNSVQCYHFGLSPDLPICKEQVQSCGPPPELLNGNVKEKTKEEYGHSEVVEYYCNPRFLMKGPNKIQCVDGEWTTLPVCIVEESTCGDIPELEHGWAQLSSPPYYYGDSVEFNCSESFTMIGHRSITCIHGVWTQLPQCVAIDKLKKCKSSNLIILEEHLKNKKEFDHNSNIRYRCRGKEGWIHTVCINGRWDPEVNCSMAQIQLCPPPPQIPNSHNMTTTLNYRDGEKVSVLCQENYLIQEGEEITCKDGRWQSIPLCVEKIPCSQPPQIEHGTINSSRSSQESYAHGTKLSYTCEGGFRISEENETTCYMGKWSSPPQCEGLPCKSPPEISHGVVAHMSDSYQYGEEVTYKCFEGFGIDGPAIAKCLGEKWSHPPSCIKTDCLSLPSFENAIPMGEKKDVYKAGEQVTYTCATYYKMDGASNVTCINSRWTGRPTCRDTSCVNPPTVQNAYIVSRQMSKYPSGERVRYQCRSPYEMFGDEEVMCLNGNWTEPPQCKDSTGKCGPPPPIDNGDITSFPLSVYAPASSVEYQCQNLYQLEGNKRITCRNGQWSEPPKCLHPCVISREIMENYNIALRWTAKQKLYSRTGESVEFVCKRGYRLSSRSHTLRTTCWDGKLEYPTCAKR

SEQ ID NO: 343 - DNA, 1701 bp, Homo sapiens
gagcaccgcacactcacttcaccctggttcaacacccccacgaggttgaccccgtcattatgttagagattatgcattttccacatagggaaactgaggctcaggggtgttaagtgactcacccaaggtcacacggctaggaagttgctgcacgctcctatgctccatttcctctgggagcctatcaacccagataaagcgggacctcctctctggtagaggtgcagggggcagtactcaacatgatcacagagggagcgcaggcccctcgattgttgctgccgccgctgctcctgctgctcaccctgccagccacaggctcagaccccgtgctctgcttcacccagtatgaagaatcctccggcaagtgcaagggcctcctggggggtggtgtcagcgtggaagactgctgtctcaacactgcctttgcctaccagaaacgtagtggtgggctctgtcagccttgcaggtccccacgatggtccctgtggtccacatgggccccctgttcggtgacgtgctctgagggctcccagctgcggtaccggcgctgtgtgggctggaatgggcagtgctctggaaaggtggcacctgggaccctggagtggcagctccaggcctgtgaggaccagcagtgctgtcctgagatgggcggctggtctggctgggggccctgggagccttgctctgtcacctgctccaaagggacccggacccgcaggcgagcctgtaatcaccctgctcccaagtgtgggggccactgcccaggacaggcacaggaatcagaggcctgtgacacccagcaggtctgccccacacacggggcctgggccacctggggcccctggaccccctgctcagcctcctgccacggtggaccccacgaacctaaggagacacgaagccgcaagtgttctgcacctgagccctcccagaaacctcctgggaagccctgcccggggctagcctacgagcagcggaggtgcaccggcctgccaccctgcccagtggctgggggctgggggccttggggccctgtgagcccctgccctgtgacctgtggcctgggccagaccatggaacaacggacgtgcaatcaccctgtgccccagcatgggggccccttctgtgctggcgatgccacccggacccacatctgcaacacagctgtgccctgccctgtggatggggagtgggactcgtggggggagtggagcccctgtatccgacggaacatgaagtccatcagctgtcaagaaatcccgggccagcagtcacgcgggaggacctgcaggggccgcaagtttgacggacatcgatgtgccgggcaacagcaggatatccggcactgctacagcatccagcactgccccttgaaaggatcatggtcagagtggagtacctgggggctgtgcatgcccccctgtggacctaatcctacccgtgcccgccagcgcctctgcacacccttgctccccaagtacccgcccaccgtttccatggtcgaaggtcagggcgagaagaacgtgaccttctgggggagaccgctgccacggtgtgaggagctacaagggcagaagctggtggtggaggagaaacgaccatgtctacacgtgcctgcttgcaaagaccctgaggaagaggaactctaacacttctctcctccactctgagccccctgaccttccaaacctcaataaa

SEQ ID NO: 344 - protein, 469 aa, Homo sapiens
MITEGAQAPRLLLPPLLLLLTLPATGSDPVLCFTQYEESSGKCKGLLGGGVSVEDCCLNTAFAYQKRSGGLCQPCRSPRWSLWSTWAPCSVTCSEGSQLRYRRCVGWNGQCSGKVAPGTLEWQLQACEDQQCCPEMGGWSGWGPWEPCSVTCSKGTRTRRRACNHPAPKCGGHCPGQAQESEACDTQQVCPTHGAWATWGPWTPCSASCHGGPHEPKETRSRKCSAPEPSQKPPGKPCPGLAYEQRRCTGLPPCPVAGGWGPWGPVSPCPVTCGLGQTMEQRTCNHPVPQHGGPFCAGDATRTHICNTAVPCPVDGEWDSWGEWSPCIRRNMKSISCQEIPGQQSRGRTCRGRKFDGHRCAGQQQDIRHCYSIQHCPLKGSWSEWSTWGLCMPPCGPNPTRARQRLCTPLLPKYPPTVSMVEGQGEKNVTFWGRPLPRCEELQGQKLVVEEKRPCLHVPACKDPEEEEL

SEQ ID NO: 345 - DNA, 3462 bp, Artificial Sequence
  Vector: pQE32
ctcgagaaatcataaaaaatttatttgctttgtgagcggataacaattataatagattcaattgtgagcggataacaatttcacacagaattcattaaagaggagaaattaactatgagaggatctcaccatcaccatcaccatgggatccgcatgcgagctcggtaccccgggtcgacctgcagccaagcttaattagctgagcttggactcctgttgatagatccagtaatgacctcagaactccatctggatttgttcagaacgctcggttgccgccgggcgttttttattggtgagaatccaagctagcttggcgagattttcaggagctaaggaagctaaaatggagaaaaaaatcactggatataccaccgttgatatatcccaatggcatcgtaaagaacattttgaggcatttcagtcagttgctcaatgtacctataaccagaccgttcagctggatattacggcctttttaaagaccgtaaagaaaaataagcacaagttttatccggcctttattcacattcttgcccgcctgatgaatgctcatccggaatttcgtatggcaatgaaagacggtgagctggtgatatgggatagtgttcacccttgttacaccgttttccatgagcaaactgaaacgttttcatcgctctggagtgaataccacgacgatttccggcagtttctacacatatattcgcaagatgtggcgtgttacggtgaaaacctggcctatttccctaaagggtttattgagaatatgtttttcgtctcagccaatccctgggtgagtttcaccagttttgatttaaacgtggccaatatggacaacttcttcgcccccgttttcaccatgggcaaatattatacgcaaggcgacaaggtgctgatgccgctggcgattcaggttcatcatgccgtttgtgatggcttccatgtcggcagaatgcttaatgaattacaacagtactgcgatgagtggcagggcggggcgtaatttttttaaggcagttattggtgcccttaaacgcctggggtaatgactctctagcttgaggcatcaaataaaacgaaaggctcagtcgaaagactgggcctttcgttttatctgttgtttgtcggtgaacgctctcctgagtaggacaaatccgccctctagagctgcctcgcgcgtttcggtgatgacggtgaaaacctctgacacatgcagctcccggagacggtcacagcttgtctgtaagcggatgccgggagcagacaagcccgtcagggcgcgtcagcgggtgttggcgggtgtcggggcgcagccatgacccagtcacgtagcgatagcggagtgtatactggcttaactatgcggcatcagagcagattgtactgagagtgcaccatatgcggtgtgaaataccgcacagatgcgtaaggagaaaataccgcatcaggcgctcttccgcttcctcgctcactgactcgctgcgctcggtcgttcggctgcggcgagcggtatcagctcactcaaaggcggtaatacggttatccacagaatcaggggataacgcaggaaagaacatgtgagcaaaaggccagcaaaaggccaggaaccgtaaaaaggccgcgttgctggcgtttttccataggctccgcccccctgacgagcatcacaaaaatcgacgctcaagtcagaggtggcgaaacccgacaggactataaagataccaggcgtttccccctggaagctccctcgtgcgctctcctgttccgaccctgccgcttaccggatacctgtccgcctttctcccttcgggaagcgtggcgctttctcatagctcacgctgtaggtatctcagttcggtgtaggtcgttcgctccaagctgggctgtgtgcacgaaccccccgttcagcccgaccgctgcgccttatccggtaactatcgtcttgagtccaacccggtaagacacgacttatcgccactggcagcagccactggtaacaggattagcagagcgaggtatgtaggcggtgctacagagttcttgaagtggtggcctaactacggctacactagaaggacagtatttggtatctgcgctctgctgaagccagttaccttcggaaaaagagttggtagctcttgatccggcaaacaaaccaccgctggtagcggtggtttttttgtttgcaagcagcagattacgcgcagaaaaaaaggatctcaagaagatcctttgatcttttctacggggtctgacgctcagtggaacgaaaactcacgttaagggattttggtcatgagattatcaaaaaggatcttcacctagatccttttaaattaaaaatgaagttttaaatcaatctaaagtatatatgagtaaacttggtctgacagttaccaatgcttaatcagtgaggcacctatctcagcgatctgtctatttcgttcatccatagttgcctgactccccgtcgtgtagataactacgatacgggagggcttaccatctggccccagtgctgcaatgataccgcgagacccacgctcaccggctccagatttatcagcaataaaccagccagccggaagggccgagcgcagaagtggtcctgcaactttatccgcctccatccagtctattaattgttgccgggaagctagagtaagtagttcgccagttaatagtttgcgcaacgttgttgccattgctacaggcatcgtggtgtcacgctcgtcgtttggtatggcttcattcagctccggttcccaacgatcaaggcgagttacatgatcccccatgttgtgcaaaaaagcggttagctccttcggtcctccgatcgttgtcagaagtaagttggccgcagtgttatcactcatggttatggcagcactgcataattctcttactgtcatgccatccgtaagatgcttttctgtgactggtgagtactcaaccaagtcattctgagaatagtgtatgcggcgaccgagttgctcttgcccggcgtcaatacgggataataccgcgccacatagcagaactttaaaagtgctcatcattggaaaacgttcttcggggcgaaaactctcaaggatcttaccgctgttgagatccagttcgatgtaacccactcgtgcacccaactgatcttcagcatcttttactttcaccagcgtttctgggtgagcaaaaacaggaaggcaaaatgccgcaaaaaagggaataagggcgacacggaaatgttgaatactcatactcttcctttttcaatattattgaagcatttatcagggttattgtctcatgagcggatacatatttgaatgtatttagaaaaataaacaaataggggttccgcgcacatttccccgaaaagtgccacctgacgtctaagaaaccattattatcatgacattaacctataaaaataggcgtatcacgaggccctttcgtcttcac

SEQ ID NO: 346 - DNA, 40 bp, Artificial Sequence
  Primer: F97Dforward
caccccttcttcaatgacgacaccttcgactatgacatcg

SEQ ID NO: 347 - DNA, 40 bp, Artificial Sequence
  Primer: F97Dreverse
cgatgtcatagtcgaaggtgtcgtcattgaagaaggggtg

SEQ ID NO: 348 - DNA, 42 bp, Artificial Sequence
  Primer: F97Eforward
ccaccccttcttcaatgacgagaccttcgactatgacatcgc

SEQ ID NO: 349 - DNA, 42 bp, Artificial Sequence
  Primer: F97Ereverse
gcgatgtcatagtcgaaggtctcgtcattgaagaaggggtgg

SEQ ID NO: 350 - DNA, 39 bp, Artificial Sequence
  Primer: F97Aforward
caccccttcttcaatgacgccaccttcgactatgacatc

SEQ ID NO: 351 - DNA, 39 bp, Artificial Sequence
  Primer: F97Areverse
gatgtcatagtcgaaggtggcgtcattgaagaaggggtg

SEQ ID NO: 352 - DNA, 39 bp, Artificial Sequence
  Primer: F97Wforward
caccccttcttcaatgactggaccttcgactatgacatc

SEQ ID NO: 353 - DNA, 39 bp, Artificial Sequence
  Primer: F97Wreverse
gatgtcatagtcgaaggtccagtcattgaagaaggggtg

SEQ ID NO: 354 - DNA, 27 bp, Artificial Sequence
  Primer: Y146Nforward
ggacacacccagaacggaggcactggc

SEQ ID NO: 355 - DNA, 27 bp, Artificial Sequence
  Primer: Y146Nreverse
gccagtgcctccgttctgggtgtgtcc

SEQ ID NO: 356 - DNA, 27 bp, Artificial Sequence
  Primer: Y146Dforward
ggacacacccaggacggaggcactggc

SEQ ID NO: 357 - DNA, 27 bp, Artificial Sequence
  Primer: Y146Dreverse
gccagtgcctccgtcctgggtgtgtcc

SEQ ID NO: 358 - DNA, 29 bp, Artificial Sequence
  Primer: Y146Eforward
gggacacacccaggagggaggcactggcg

SEQ ID NO: 359 - DNA, 29 bp, Artificial Sequence
  Primer: Y146Ereverse
cgccagtgcctccctcctgggtgtgtccc

SEQ ID NO: 360 - DNA, 29 bp, Artificial Sequence
  Primer: Y146Aforward
gggacacacccaggccggaggcactggcg

SEQ ID NO: 361 - DNA, 29 bp, Artificial Sequence
  Primer: Y146Areverse
cgccagtgcctccggcctgggtgtgtccc

SEQ ID NO: 362 - DNA, 29 bp, Artificial Sequence
  Primer: Y146Wforward
gggacacacccagtggggaggcactggcg

SEQ ID NO: 363 - DNA, 29 bp, Artificial Sequence
  Primer: Y146Wreverse
cgccagtgcctccccactgggtgtgtccc

SEQ ID NO: 364 - DNA, 31 bp, Artificial Sequence
  Primer: Y146Rforward
ggggacacacccagaggggaggcactggcgc

SEQ ID NO: 365 - DNA, 31 bp, Artificial Sequence
  Primer: Y146Rreverse
gcgccagtgcctcccctctgggtgtgtcccc

SEQ ID NO: 366 - DNA, 25 bp, Artificial Sequence
  Primer: Q192Rforward
tggactcctgccggggtgattccgg

SEQ ID NO: 367 - DNA, 25 bp, Artificial Sequence
  Primer: Q192Rreverse
ccggaatcaccccggcaggagtcca

SEQ ID NO: 368 - DNA, 29 bp, Artificial Sequence
  Primer: K224Aforward
cgctcagaggaacgcgccaggcgtgtaca

SEQ ID NO: 369 - DNA, 29 bp, Homo sapiens
  Primer: K224Areverse
tgtacacgcctggcgcgttcctctgagcg

SEQ ID NO: 370 - DNA, 37 bp, Artificial Sequence
  Primer: K224Fforward
gctgcgctcagaggaacttcccaggcgtgtacacaag

SEQ ID NO: 371 - DNA, 37 bp, Artificial Sequence
  Primer: K224Freverse
cttgtgtacacgcctgggaagttcctctgagcgcagc

SEQ ID NO: 372 - DNA, 1575 bp, Homo sapiens
agaaccgcgacctccgcaaccttgagcggcatccgtggagtgcgcctgcagctacgaccgcagcaggaaagcgccgccggccaggcccagctgtggccggacagggactggaagagaggacgcggtcgagtaggtgtgcaccagccctggcaacgagagcgtctaccccgaactctgctggccttgaggtggggaagccggggagggcagttgaggaccccgcggaggcgcgtgactggttgagcgggcaggccagcctccgagccgggtggacacaggttttaaaacatgaatcctacactcatccttgctgccttttgcctgggaattgcctcagctactctaacatttgatcacagtttagaggcacagtggaccaagtggaaggcgatgcacaacagattatacggcatgaatgaagaaggatggaggagagcagtgtgggagaagaacatgaagatgattgaactgcacaatcaggaatacagggaagggaaacacagcttcacaatggccatgaacgcctttggagacatgaccagtgaagaattcaggcaggtgatgaatggctttcaaaaccgtaagcccaggaaggggaaagtgttccaggaacctctgttttatgaggcccccagatctgtggattggagagagaaaggctacgtgactcctgtgaagaatcagggtcagtgtggttcttgttgggcttttagtgctactggtgctcttgaaggacagatgttccggaaaactgggaggcttatctcactgagtgagcagaatctggtagactgctctgggcctcaaggcaatgaaggctgcaatggtggcctaatggattatgctttccagtatgttcaggataatggaggcctggactctgaggaatcctatccatatgaggcaacagaagaatcctgtaagtacaatcccaagtattctgttgctaatgacaccggctttgtggacatccctaagcaggagaaggccctgatgaaggcagttgcaactgtggggcccatttctgttgctattgatgcaggtcatgagtccttcctgttctataaagaaggcatttattttgagccagactgtagcagtgaagacatggatcatggtgtgctggtggttggctacggatttgaaagcacagaatcagataacaataaatattggctggtgaagaacagctggggtgaagaatggggcatgggtggctacgtaaagatggccaaagaccggagaaaccattgtggaattgcctcagcagccagctaccccactgtgtgagctggtggacggtgatgaggaaggacttgactggggatggcgcatgcatgggaggaattcatcttcagtctaccagcccccgctgtgtcggatacacactcgaatcattgaagatccgagtgtgatttgaattctgtgatattttcacactggtaaatgttacctctattttaattactgctataaataggtttatattattgattcacttactgactttgcattttcgtttttaaaaggatgtataaatttttacctgtttaaataaaatttaatttcaaatgt

SEQ ID NO: 373 - protein, 333 aa, Homo sapiens [sequence omitted]

SEQ ID NO: 374 - DNA, 1342 bp, Homo sapiens
cggctgtaatctcagaggcttgtttgctgagggtgcctgcgcacgtgcgacggctgctggttttgaaacatgaatctttcgctcgtcctggctgccttttgcttgggaatagcctccgctgttccaaaatttgaccaaaatttggatacaaagtggtaccagtggaaggcaacacacagaagattatatggcgcgaatgaagaaggatggaggagagcagtgtgggaaaagaatatgaaaatgattgaactgcacaatggggaatacagccaagggaaacatggcttcacaatggccatgaatgcttttcctgacatgaccaatgaagaattcaggcagatgatgggttgctttcgaaaccagaaattcaggaaggggaaagtgttccgtgagcctctgtttcttgatcttcccaaatctgtggattggagaaagaaaggctacgtgacgccagtgaagaatcagaaacagtgtggttcttgttgggcttttagtgcgactggtgctcttgaaggacagatgttccggaaaactgggaaacttgtctcactgagcgagcagaatctggtggactgttcgcgtcctcaaggcaatcagggctgcaatggtggcttcatggctagggccttccagtatgtcaaggagaacggaggcctggactctgaggaatcctatccatatgtagcagtggatgaaatctgtaagtacagacctgagaattctgttgctaatgacactggcttcacagtggtcgcacctggaaaggagaaggccctgatgaaagcagtcgcaactgtggggcccatctccgttgctatggatgcaggccattcgtccttccagttctacaaatcaggcatttattttgaaccagactgcagcagcaaaaacctggatcatggtgttctggtggttggctacggctttgaaggagcaaattcgaataacagcaagtattggctcgtcaaaaacagctggggtccagaatggggctcgaatggctatgtaaaaatagccaaagacaagaacaaccactgtggaatcgccacagcagccagctaccccaatgtgtgagctgatggatggtgaggaggaaggacttaaggacagcatgtctggggaaattttatcttgaaactgaccaaacgcttattgtgtaagataaaccagttgaatcattgaggatccaagttgagattttaattctgtgacatttttacaagggtaaaatgttaccactactttaattattgttatacacagctttatgatatcaaagactcattgcttaattctaagacttttgaattttcattttttaaaaagatgtacaaaacagttt

SEQ ID NO: 375 - protein, 334 aa, Homo sapiens
MNLSLVLAAFCLGIASAVPKFDQNLDTKWYQWKATHRRLYGANEEGWRRAVWEKNMKMIELHNGEYSQGKHGFTMAMNAFGDMTNEEFRQMMGCFRNQKFRKGKVFREPLFLDLPKSVDWRKKGYVTPVKNQKQCGSCWAFSATGALEGQMFRKTGKLVSLSEQNLVDCSRPQGNQGCNGGFMARAFQYVKENGGLDSEESYPYVAVDEICKYRPENSVANDTGFTVVAPGKEKALMKAVATVGPISVAMDAGHSSFQFYKSGIYFEPDCSSKNLDHGVLVVGYGFEGANSNNSKYWLVKNSWGPEWGSNGYVKIAKDKNNHCGIATAASYPNV

SEQ ID NO: 376 - DNA, 1661 bp, Homo sapiens
attcggcacgagccgcaatcccgatggaataaatctagcacccctgatggtgtgcccacactttgctgccgaaacgaagccagacaacagatttccatcagcaggatgtgggggctcaaggttctgctgctacctgtggtgagctttgctctgtaccctgaggagatactggacacccactgggagctatggaagaagacccacaggaagcaatataacaacaaggtggatgaaatctctcggcgtttaatttgggaaaaaaacctgaagtatatttccatccataaccttgaggcttctcttggtgtccatacatatgaactggctatgaaccacctgggggacatgaccagtgaagaggtggttcagaagatgactggactcaaagtacccctgtctcattcccgcagtaatgacaccctttatatcccagaatgggaaggtagagccccagactctgtcgactatcgaaagaaaggatatgttactcctgtcaaaaatcagggtcagtgtggttcctgttgggcttttagctctgtgggtgccctggagggccaactcaagaagaaaactggcaaactcttaaatctgagtccccagaacctagtggattgtgtgtctgagaatgatggctgtggagggggctacatgaccaatgccttccaatatgtgcagaagaaccggggtattgactctgaagatgcctacccatatgtgggacaggaagagagttgtatgtacaacccaacaggcaaggcagctaaatgcagagggtacagagagatccccgaggggaatgagaaagccctgaagagggcagtggcccgagtgggacctgtctctgtggccattgatgcaagcctgacctccttccagttttacagcaaaggtgtgtattatgatgaaagctgcaatagcgataatctgaaccatgcggttttggcagtgggatatggaatccagaagggaaacaagcactggataattaaaaacagctggggagaaaactggggaaacaaaggatatatcctcatggctcgaaataagaacaacgcctgtggcattgccaacctggccagcttccccaagatgtgactccagccagccaaatccatcctgctcttccatttcttccacgatggtgcagtgtaacgatgcactttggaagggagttggtgtgctatttttgaagcagatgtggtgatactgagattgtctgttcagtttccccatttgtttgtgcttcaaatgatccttcctactttggttctctcctcccatgacctttttcactgtggccatcaggactttccctgacagctgtgtactcttaggctaagagatgtgactacagcctgcccctgactgtgttgtcccagggctgatgctgtacaggtacaggctggagattttcacataggttagattctcattcacgggactagttagctttaagcaccctagaggactagggtaatctgacttctcacttcctaagttcccttcaatatcctcaaggtagaaatgtctatgttttctactccaattcataaatctattcataagtctttggtacaagtttacatgataaaaagaaatgtgatttgtcttcccttctttgcacttttgaaataaagtatttatctcctgtctacagttta

SEQ ID NO: 377 - protein, 329 aa, Homo sapiens
MWGLKVLLLPVVSFALYPEEILDTHWELWKKTHRKQYNNKVDEISRRLIWEKNLKYISIHNLEASLGVHTYELAMNHLGDMTSEEVVQKMTGLKVPLSHSRSNDTLYIPEWEGRAPDSVDYRKKGYVTPVKNQGQCGSCWAFSSVGALEGQLKKKTGKLLNLSPQNLVDCVSENDGCGGGYMTNAFQYVQKNRGIDSEDAYPYVGQEESCMYNPTGKAAKCRGYREIPEGNEKALKRAVARVGPVSVAIDASLTSFQFYSKGVYYDESCNSDNLNHAVLAVGYGIQKGNKHWIIKNSWGENWGNKGYILMARNKNNACGIANLASFPKM

SEQ ID NO: 378 - DNA, 1255 bp, Homo sapiens
ctaaagatgaaacggctggtttgtgtgctcttggtgtgctcctctgcagtggcacagttgcataaagatcctaccctggatcaccactggcatctctggaagaaaacctatggcaaacaatacaaggaaaagaatgaagaagcagtacgacgtctcatctgggaaaagaatctaaagtttgtgatgcttcacaacctggagcattcaatgggaatgcactcatacgatctgggcatgaaccacctgggagacatgaccagtgaagaagtgatgtctttgacgagttccctgagagttcccagccagtggcagagaaatatcacatataagtcaaaccctaatcggatattgcctgattctgtggactggagagagaaagggtgtgttactgaagtgaaatatcaaggttcttgtggtgcttgctgggctttcagtgctgtgggggccctggaagcacagctgaagctgaaaacaggaaagctggtgactctcagtgcccagaacctggtggattgctcaactgaaaaatatggaaacaaaggctgcaatggtggcttcatgacaacggctttccagtacatcattgataacaagggcatcgactcagacgcttcctatccctacaaagccatggatcagaaatgtcaatatgactcaaaatatcgtgctgccacatgttcaaagtacactgaacttccttatgggagagaagatgtcctgaaagaagctgtggccaataaaggcccagtgtctgttggtgtagatgcgcgtcatccttctttcttcctctacagaagtggtgtctactatgaaccatcctgtactcagaatgtgaatcatggtgtacttgtggttggctatggtgatcttaatgggaaagaatactggcttgtgaaaaacagctggggccacaactttggtgaagaaggatatattcggatggcaagaaataaaggaaatcattgtgggattgctagctttccctcttacccagaaatctagaggatctctcctttttataacaaatcaagaaatatgaagcactttctcttaacttaatttttcctgctgtatccagaagaaataattgtgtcatgattaatgtgtatttactgtactaatagaaaatatagtttgaggccgggcactgtctggctcacgcctgtaatcccagtacttgggaggccaaggaggcatatcaacttgaggccaggagttaaagagcagcctggctaactgtgaaaccctctctact

SEQ ID NO: 379 - protein, 331 aa, Homo sapiens
MKRLVCVLLVCSSAVAQLHKDPTLDHHWHLWKKTYGKQYKEKNEEAVRRLIWEKNLKFVMLHNLEHSMGMHSYDLGMNHLGDMTSEEVMSLMSSLRVPSQWQRNITYKSNPNRILPDSVDWREKGCVTEVKYQGSCGACWAFSAVGALEAQLKLKTGKLVTLSAQNLVDCSTEKYGNKGCNGGFMTTAFQYIIDNKGIDSDASYPYKAMDQKCQYDSKYRAATCSKYTELPYGREDVLKEAVANKGPVSVGVDARHPSFFLYRSGVYYEPSCTQNVNHGVLVVGYGDLNGKEYWLVKNSWGHNFGEEGYIRMARNKGNHCGIASFPSYPEI

SEQ ID NO: 380 - DNA, 1517 bp, Homo sapiens
gaattccgggtctgttgggtccgggccgccggcttcgccctcgccatggcgccctggctgcagctcctgtcgctgctggggctgctcccgggcgcagtggccgcccccgcccagccccgagccgccagctttcaggcctgggggccgccgtccccggagctgctggcgcccacccgcttcgcgctggagatgttcaaccgcggccgggctgcggggacgcgggccgtgctgggccttgtgcgcggccgcgtccgccgggcgggtcaggggtcgctgtactccctggaggccaccctggaggagccaccctgcaacgaccccatggtgtgccggctccccgtgtccaagaaaaccctgctctgcagcttccaagtcctggatgagctcggaagacacgtgctgctgcggaaggactgtggcccagtggacaccaaggttccaggtgctggggagcccaagtcagccttcactcagggctcagccatgatttcttctctgtcccaaaaccatccagacaacagaaacgagactttcagctcagtcatttccctgttgaatgaggatcccctgtcccaggacttgcctgtgaagatggcttcaatcttcaagaactttgtcattacctataaccggacatatgagtcaaaggaagaagcccggtggcgcctgtccgtctttgtcaataacatggtgcgagcacagaagatccaggccctggaccgtgggacagctcagtatggagtcaccaagttcagtgatctcacagaggaggagttccgcactatctacctgaatactctcctgaggaaagagcctggcaacaagatgaagcaagccaagtctgtgggtgacctcgccccacctgaatgggactggaggagtaagggggctgtcacaaaagtcaaagaccagggcatgtgtggctcctgctgggccttctcagtcacaggcaatgtggagggccagtggtttctcaaccaggggaccctgctctccctctctgaacaggagctcttggactgtgacaagatggacaaggcctgcatgggcggcttgccctccaatgcctactcggccataaagaatttgggagggctggagacagaggatgactacagctaccagggtcacatgcagtcctgcaacttctcagcagagaaggccaaggtctacatcaatgactccgtggagctgagccagaacgagcagaagctggcagcctggctggccaagagaggcccaatctccgtggccatcaatgcctttggcatgcagttttaccgccacgggatctcccgccctctccggcccctctgcagcccttggctcattgaccatgcggtgttgcttgtgggctacggcaaccgctctgacgttcccttttgggccatcaagaacagctggggcactgactggggtgagaagggttactactacttgcatcgtgggtccggggcctgtggcgtgaacaccatggccagctcggcggtggtggactgaagaggggccccgaattc

SEQ ID NO: 381 - protein, 484 aa, Homo sapiens [sequence omitted]

SEQ ID NO: 382 - DNA, 2002 bp, Homo sapiens
aattccgcggcaaccgctccggcaacgccaaccgctccgctgcgcgcaggctgggctgcaggctctcggctgcagcgctgggctggtgtgcagtggtgcgaccacggctcacggcagcctcagccacccagatgtaagcgatctggttcccacctcagccttccgagtagtggatctaggatctggcttccaacatgtggcagctctgggcctccctctgctgcctgctggtgttggccaatgcccggagcaggccctctttccatcccgtgtcggatgagctggtcaactatgtcaacaaacggaataccacgtggcaggccgggcacaacttctacaacgtggacatgagctacttgaagaggctatgtggtaccttcctgggtgggcccaagccaccccagagagttatgtttaccgaggacctgaagctgcctgcaagcttcgatgcacgggaacaatggccacagtgtcccaccatcaaagagatcagagaccagggctcctgtggctcctgctgggccttcggggctgtggaagccatctctgaccgcatctgcatccacaccaatgcgcacgtcagcgtggaggtgtcggcggaggacctgctcacctgctgtggcagcatgtgtggggacggctgtaatggtggctatcctgctgaagcttggaacttctggacaagaaaaggcctggtttctggtggcctctatgaatcccatgtagggtgcagaccgtactccatccctccctgtgagcaccacgtcaacggctcccggcccccatgcacgggggagggagatacccccaagtgtagcaagatctgtgagcctggctacagcccgacctacaaacaggacaagcactacggatacaattcctacagcgtctccaatagcgagaaggacatcatggccgagatctacaaaaacggccccgtggagggagctttctctgtgtattcggacttcctgctctacaagtcaggagtgtaccaacacgtcaccggagagatgatgggtggccatgccatccgcatcctgggctggggagtggagaatggcacaccctactggctggttgccaactcctggaacactgactggggtgacaatggcttctttaaaatactcagaggacaggatcactgcggaatcgaatcagaagtggtggctggaattccacgcaccgatcagtactgggaaaagatctaatctgccgtgggcctgtcgtgccagtcctgggggcgagatcggggtagaaagtcattttattctttaagttcacgtaagatacaagtttcaggcagggtctgaaggactggattggccaaagtcctccaaggagaccaagtcctggctacatcccagcctgtggttacagtgcagacaggccatgtgagccaccgctgccagcacagagcgtccttccccctgtagactagtgccgtgggagtacctgctgcccagctgctgtggccccctccgtgatccatccatctccagggagcaagacagagacgcaggatggaaagcggagttcctaacaggatgaaagttcccccatcagttcccccagtacctccaagcaagtagctttccacatttgtcacagaaatcagaggagagatggtgttgggagccctttggagaacgccagtctccaggtccccctgcatctatcgagtttgcaatgtcacaacctctctgatcttgtgctcagcatgattctttaatagaagttttatttttcgtgcactctgctaatcatgtgggtgagccagtggaacagcgggagcctgtgctggtttgcagattgcctcctaatgacgcggctcaaaaggaaaccaagtggtcaggagttgtttctgacccactgatctctactaccacaaggaaaatagtttaggagaaaccagcttttactgtttttgaaaaattacagcttcaccctgtcaagttaacaaggaatgcctgtgccaataaaaggtttctccaacttg

SEQ ID NO: 383 - protein, 339 aa, Homo sapiens
MWQLWASLCCLLVLANARSRPSFHPLSDELVNYVNKRNTTWQAGHNFYNVDMSYLKRLCGTFLGGPKPPQRVMFTEDLKLPASFDAREQWPQCPTIKEIRDQGSCGSCWAFGAVEAISDRICIHTNAHVSVEVSAEDLLTCCGSMCGDGCNGGYPAEAWNFWTRKGLVSGGLYESHVGCRPYSIPPCEHHVNGSRPPCTGEGDTPKCSKICEPGYSPTYKQDKHYGYNSYSVSNSEKDIMAEIYKNGPVEGAFSVYSDFLLYKSGVYQHVTGEMMGGHAIRILGWGVENGTPYWLVANSWNTDWGDNGFFKILRGQDHCGIESEVVAGIPRTDQYWEKI

SEQ ID NO: 384 - DNA, 1292 bp, Carica papaya
atccattcccacttaagaagtaaaaagatatagctagtgtcacaatggctatgataccttcaatttcaaagttgctttttgttgcaatatgtctttttgtttatatgggtttgtcatttggtgatttttctattgtgggttattctcaaaatgacttgacatccactgaaagacttattcagctatttgaatcgtggatgttgaagcacaataagatttataagaatattgatgaaaaaatctacagatttgaaatttttaaagataatcttaaatatattgatgagacaaataagaaaaataacagttattggcttggattaaatgtgtttgctgatatgagcaatgatgaattcaaagaaaagtatactggttctattgctggaaattatacaacaaccgaactatcatacgaagaagtgcttaatgatggtgatgtaaatatcccggagtatgtcgattggagacaaaaaggagctgtcactcctgtaaaaaatcagggttcttgtggtagttgttgggcattctcagctgttgtaactatagagggaataattaagattagaactgggaacttaaatgaatactcagagcaagaactgcttgactgcgacagacgtagctacgggtgcaatggaggttacccttggagtgcacttcaattagtggctcaatatggtattcactacagaaatacttacccatatgagggagtgcaacgttattgtcgctcaagggagaaaggtccttatgcagccaaaaccgatggggttcgacaagtgcaaccatataatgaaggggctctcttatattcaattgcaaaccaacctgtgagcgttgtccttgaagctgctggaaaagatttccaattatatagagggggaatatttgtggggccatgcggaaacaaagtagatcatgcagtcgcagcagttgggtatggaccaaattacatactcataaagaattcatggggtacaggatggggtgaaaatggatatataagaatcaaaagaggcactggaaactcctatggagtatgtggactttatacaagctcattctatcctgttaaaaactgatgagatcacggctttcataaaatcccttatatatatatatatatatagaacttgtatactcatcgtgtgttgaaataataaatgagaggattaataatttgtgtaatcctatatatcacagtttgttgtgacaaacttttgcatcgcttgttatattatttgtaataatgtttgttttgattgaataaacttttacatatacttttatgc

SEQ ID NO: 385 - protein, 345 aa, Carica papaya
MAMIPSISKLLFVAICLFVYMGLSFGDFSIVGYSQNDLTSTERLIQLFESWMLKHNKIYKNIDEKIYRFEIFKDNLKYIDETNKKNNSYWLGLNVFADMSNDEFKEKYTGSIAGNYTTTELSYEEVLNDGDVNIPEYVDWRQKGAVTPVKNQGSCGSCWAFSAVVTIEGIIKIRTGNLNEYSEQELLDCDRRSYGCNGGYPWSALQLVAQYGIHYRNTYPYEGVQRYCRSREKGPYAAKTDGVRQVQPYNEGALLYSIANQPVSVVLEAAGKDFQLYRGGIFVGPCGNKVDHAVAAVGYGPNYILIKNSWGTGWGENGYIRIKRGTGNSYGVCGLYTSSFYPVKN

SEQ ID NO: 386 - DNA, 1845 bp, Trypanosoma cruzi
atgtctggctgggcgcgtgcgctgttgctcgcggccgtcctggtcgtcatggcgtgcctcgtccccgcggcgacggcgagcctgcatgcggaggagacgctgacgtcgcaattcgcagaattcaagcagaagcatggcagggtgtacgagagcgccgcggaggaggcgttccgcctgagcgtgttcagggagaacctgtttcttgcgaggctgcacgccgcggcaaacccacacgcgaccttcggcgtcacgcccttctcggacctcacgcgcgaggaattccggtcccgctaccacaacggcgcggcgcactttgcggcggcgcaggagcgcgcgagagtgccggtgaaggtggaggtagttggcgcgcccgcggcagtggattggcgtgcgagaggcgccgtgacagccgtcaaggaccagggccaatgcggttcgtgctgggccttctccgccattggcaacgttgagtgccagtggtttcttgccggccacccgctgacgaacctgtcggagcagatgctcgtgtcgtgcgacaaaacggactctggctgcagtggtggcctgatgaacaacgcctttgagtggattgtgcaggagaataacggcgccgtgtacacggaggacagctacccttatgcgtcgggcgaggggatatcgccgccgtgcacgacgtcaggccacacggtgggtgccacgattaccggtcacgttgaattacctcaggacgaggcccaaatagccgcatggcttgcagtcaatggcccggttgccgttgccgtcgacgccagcagctggatgacctacacgggcggcgttatgacgagctgcgtctccgagcagctggatcacggcgttcttctcgtcggctacaatgacagcgccgcagtgccgtactggatcatcaagaactcgtggaccacgcagtggggcgaggaaggctacatccgcattgcaaagggctcgaaccagtgccttgtcaaggaggaggcgagctccgcggtggtcggtggtcccggacccactcccgagccaaccaccacgacaaccacaagtgccccaggaccgtccccatcgtactttgtgcagatgtcctgcactgacgctgcgtgcattgtcgggtgcgagaacgtgacgttaccgaccggtcagtgtctcctgaccaccagcggcgtctctgccattgtcacgtgcggtgctgagactctcacagaagaagtcttccttacgagtacgcactgcagcggcccatcggtgaggtcctctgttcctctcaacaaatgcaaccggcttttaagaggctccgttgagttcttctgcggctccagctccagtggccgactggccgacgtggacaggcagcgtcgccatcagccataccacagccgtcatcgccgcctctgagggcactctttgtttctgatgctgccttttctctcattttacttttttattattattgagcgagcgtcggtgctgcggcacactgggcaaataagtcccagtggagtggattgtttattgatttgctccatgtatgtgttttcttttttgtgcacaactgcaaatatgtgtccgcgatcgacgtctcagccacgcgtgtgttttttctattatatgcttctgttgagcgcccgagcattccccactgtggctgaacccaccgccgtccccgactgtcacccgaccatgcggggcggggtggcgtggcaacgctcctttgccgcggcgtgcacatacacgcgcgcatgcttcttctctccacgtcaacgccgacaccaccacagtctgaaggtgacgctgttgaaggcacacaaggaaggaaacacacccacacaagcagta

SEQ ID NO: 387 - protein, 467 aa, Trypanosoma cruzi
MSGWARALLLAAVLVVMACLVPAATASLHAEETLTSQFAEFKQKHGRVYESAAEEAFRLSVFRENLFLARLHAAANPHATFGVTPFSDLTREEFRSRYHNGAAHFAAAQERARVPVKVEVVGAPAAVDWRARGAVTAVKDQGQCGSCWAFSAIGNVECQWFLAGHPLTNLSEQMLVSCDKTDSGCSGGLMNNAFEWIVQENNGAVYTEDSYPYASGEGISPPCTTSGHTVGATITGHVELPQDEAQIAAWLAVNGPVAVAVDASSWMTYTGGVMTSCVSEQLDHGVLLVGYNDSAAVPYWIIKNSWTTQWGEEGYIRIAKGSNQCLVKEEASSAVVGGPGPTPEPTTTTTTSAPGPSPSYFVQMSCTDAACIVGCENVTLPTGQCLLTTSGVSAIVTCGAETLTEEVFLTSTHCSGPSVRSSVPLNKCNRLLRGSVEFFCGSSSSGRLADVDRQRRHQPYHSRHRRL

SEQ ID NO: 388 - protein, 4 aa, Artificial Sequence
  Protease cleavage site
LPSR

SEQ ID NO: 389 - protein, 4 aa, Artificial Sequence
  Protease cleavage site
SLLR

SEQ ID NO: 390 - protein, 4 aa, Artificial Sequence
  Protease cleavage site
HRGR

SEQ ID NO: 391 - protein, 4 aa, Artificial Sequence
  Protease cleavage site
GATR

SEQ ID NO: 392 - protein, 4 aa, Artificial Sequence
  Protease cleavage site
SLGR

SEQ ID NO: 393 - protein, 4 aa, Artificial Sequence
  Protease cleavage site
VFAK

SEQ ID NO: 394 - protein, 4 aa, Artificial Sequence
  Protease cleavage site
REFK

SEQ ID NO: 395 - protein, 4 aa, Artificial Sequence
  Protease cleavage site
GLAR

SEQ ID NO: 396 - protein, 4 aa, Artificial Sequence
  Protease cleavage site
RLGR

SEQ ID NO: 397 - protein, 4 aa, Artificial Sequence
  Protease cleavage site
AEGK

SEQ ID NO: 398 - protein, 4 aa, Artificial Sequence
  Protease cleavage site
QHAR

SEQ ID NO: 399 - protein, 4 aa, Artificial Sequence
  Protease cleavage site
LGLA

SEQ ID NO: 400 - protein, 4 aa, Artificial Sequence
  Protease cleavage site
LSVV

SEQ ID NO: 401 - protein, 4 aa, Artificial Sequence
  Protease cleavage site
RQAR

SEQ ID NO: 402 - protein, 4 aa, Artificial Sequence
  Protease cleavage site
PRFK

SEQ ID NO: 403 - protein, 4 aa, Artificial Sequence
  Protease cleavage site
KQGR

SEQ ID NO: 404 - protein, 855 aa, Homo sapiens
MGSDRARKGGGGPKDFGAGLKYNSRHEKVNGLEEGVEFLPVNNVKKVEKHGPGRWVVLAAVLIGLLLVLLGIGFLVWHLQYRDVRVQKVFNGYMRITNENFVDAYENSNSTEFVSLASKVKDALKLLYSGVPFLGPYHKESAVTAFSEGSVIAYYWSEFSIPQHLVEEAERVMAEERVVMLPPRARSLKSFVVTSVVAFPTDSKTVQRTQDNSCSFGLHARGVELMRFTTPGFPDSPYPAHARCQWALRGDADSVLSLTFRSFDLASCDERGSDLVTVYNTLSPMEPHALVQLCGTYPPSYNLTFHSSQNVLLITLITNTERRHPGFEATFFQLPRMSSCGGRLRKAQGTFNSPYYPGHYPPNIDCTWNIEVPNNQHVKVRFKFFYLLEPGVPAGTCPKDYVEINGEKYCGERSQFVVTSNSNKITVRFHSDQSYTDTGFLAEYLSYDSSDPCPGQFTCRTGRCIRKELRCDGWADCTDHSDELNCSCDAGHQFTCKNKFCKPLFWVCDSVNDCGDNSDEQGCSCPAQTFRCSNGKCLSKSQQCNGKDDCGDGSDEASCPKVNVVTCTKHTYRCLNGLCLSKGNPECDGKEDCSDGSDEKDCDCGLRSFTRQARVVGGTDADEGEWPWQVSLHALGQGHICGASLISPNWLVSAAHCYIDDRGFRYSDPTQWTAFLGLHDQSQRSAPGVQERRLKRIISHPFFNDFTFDYDIALLELEKPAEYSSMVRPICLPDASHVFPAGKAIWVTGWGHTQDGGTGALILQKGEIRVINQTTCENLLPQQITPRMMCVGFLSGGVDSCQGDSGGPLSSVEADGRIFQAGVVSWGDGCAQRNFPGVYTRLPLFRDWIKENTGV

SEQ ID NO: 405 - protein, 855 aa, Homo sapiens
MGSDRARKGGGGPKDFGAGLKYNSRHEKVNGLEEGVEFLPVNNVKKVEKHGPGRWVVLAAVLIGLLLVLLGIGFLVWHLQYRDVRVQKVFNGYMRITNENFVDAYENSNSTEFVSLASKVKDALKLLYSGVPFLGPYHKESAVTAFSEGSVIAYYWSEFSIPQHLVEEAERVMAEERVVMLPPRARSLKSFVVTSVVAFPTDSKTVQRTQDNSCSFGLHARGVELMRFTTPGFPDSPYPAHARCQWALRGDADSVLSLTFRSFDLASCDERGSDLVTVYNTLSPMEPHALVQLCGTYPPSYNLTFHSSQNVLLITLITNTERRHPGFEATFFQLPRMSSCGGRLRKAQGTFNSPYYPGHYPPNIDCTWNIEVPNNQHVKVRFKFFYLLEPGVPAGTCPKDYVEINGEKYCGERSQFVVTSNSNKITVRFHSDQSYTDTGFLAEYLSYDSSDPCPGQFTCRTGRCIRKELRCDGWADCTDHSDELNCSCDAGHQFTCKNKFCKPLFWVCDSVNDCGDNSDEQGCSCPAQTFRCSNGKCLSKSQQCNGKDDCGDGSDEASCPKVNVVTCTKHTYRCLNGLCLSKGNPECDGKEDCSDGSDEKDCDCGLRSFTRQARVVGGTDADEGEWPWQVSLHALGQGHICGASLISPNWLVSAAHCYIDDRGFRYSDPTQWTAFLGLHDQSQRSAPGVQERRLKRIISHPFFNDFTFDYDIALLELEKPAEYSSMVRPICLPDASHVFPAGKAIWVTGWGHTQYGGTGALILQKGEIRVINQTTCENLLPQQITPRMMCVGFLSGGVDSCVGDSGGPLSSVEADGRIFQAGVVSWGDGCAQRNKPGVYTRLPLFRDWIKENTGV

SEQ ID NO: 406 - protein, 855 aa, Homo sapiens
MGSDRARKGGGGPKDFGAGLKYNSRHEKVNGLEEGVEFLPVNNVKKVEKHGPGRWVVLAAVLIGLLLVLLGIGFLVWHLQYRDVRVQKVFNGYMRITNENFVDAYENSNSTEFVSLASKVKDALKLLYSGVPFLGPYHKESAVTAFSEGSVIAYYWSEFSIPQHLVEEAERVMAEERVVMLPPRARSLKSFVVTSVVAFPTDSKTVQRTQDNSCSFGLHARGVELMRFTTPGFPDSPYPAHARCQWALRGDADSVLSLTFRSFDLASCDERGSDLVTVYNTLSPMEPHALVQLCGTYPPSYNLTFHSSQNVLLITLITNTERRHPGFEATFFQLPRMSSCGGRLRKAQGTFNSPYYPGHYPPNIDCTWNIEVPNNQHVKVRFKFFYLLEPGVPAGTCPKDYVEINGEKYCGERSQFVVTSNSNKITVRFHSDQSYTDTGFLAEYLSYDSSDPCPGQFTCRTGRCIRKELRCDGWADCTDHSDELNCSCDAGHQFTCKNKFCKPLFWVCDSVNDCGDNSDEQGCSCPAQTFRCSNGKCLSKSQQCNGKDDCGDGSDEASCPKVNVVTCTKHTYRCLNGLCLSKGNPECDGKEDCSDGSDEKDCDCGLRSFTRQARVVGGTDADEGEWPWQVSLHALGQGHICGASLISPNWLVSAAHCYIDDRGFRYSDPTQWTAFLGLHDQSQRSAPGVQERRLKRIISHPFFNDDTFDYDIALLELEKPAEYSSMVRPICLPDASHVFPAGKAIWVTGWGHTQYGGTGALILQKGEIRVINQTTCENLLPQQITPRMMCVGFLSGGVDSCQGDSGGPLSSVEADGRIFQAGVVSWGDGCAQRNKPGVYTRLPLFRDWIKENTGV

SEQ ID NO: 407 - protein, 855 aa, Homo sapiens
MGSDRARKGGGGPKDFGAGLKYNSRHEKVNGLEEGVEFLPVNNVKKVEKHGPGRWVVLAAVLIGLLLVLLGIGFLVWHLQYRDVRVQKVFNGYMRITNENFVDAYENSNSTEFVSLASKVKDALKLLYSGVPFLGPYHKESAVTAFSEGSVIAYYWSEFSIPQHLVEEAERVMAEERVVMLPPRARSLKSFVVTSVVAFPTDSKTVQRTQDNSCSFGLHARGVELMRFTTPGFPDSPYPAHARCQWALRGDADSVLSLTFRSFDLASCDERGSDLVTVYNTLSPMEPHALVQLCGTYPPSYNLTFHSSQNVLLITLITNTERRHPGFEATFFQLPRMSSCGGRLRKAQGTFNSPYYPGHYPPNIDCTWNIEVPNNQHVKVRFKFFYLLEPGVPAGTCPKDYVEINGEKYCGERSQFVVTSNSNKITVRFHSDQSYTDTGFLAEYLSYDSSDPCPGQFTCRTGRCIRKELRCDGWADCTDHSDELNCSCDAGHQFTCKNKFCKPLFWVCDSVNDCGDNSDEQGCSCPAQTFRCSNGKCLSKSQQCNGKDDCGDGSDEASCPKVNVVTCTKHTYRCLNGLCLSKGNPECDGKEDCSDGSDEKDCDCGLRSFTRQARVVGGTDADEGEWPWQVSLHALGQGHICGASLISPNWLVSAAHCYIDDRGFRYSDPTQWTAFLGLHDQSQRSAPGVQERRLKRIISHPFFNDETFDYDIALLELEKPAEYSSMVRPICLPDASHVFPAGKAIWVTGWGHTQYGGTGALILQKGEIRVINQTTCENLLPQQITPRMMCVGFLSGGVDSCQGDSGGPLSSVEADGRIFQAGVVSWGDGCAQRNKPGVYTRLPLFRDWIKENTGV

SEQ ID NO: 408 - protein, 855 aa, Homo sapiens
MGSDRARKGGGGPKDFGAGLKYNSRHEKVNGLEEGVEFLPVNNVKKVEKHGPGRWVVLAAVLIGLLLVLLGIGFLVWHLQYRDVRVQKVFNGYMRITNENFVDAYENSNSTEFVSLASKVKDALKLLYSGVPFLGPYHKESAVTAFSEGSVIAYYWSEFSIPQHLVEEAERVMAEERVVMLPPRARSLKSFVVTSVVAFPTDSKTVQRTQDNSCSFGLHARGVELMRFTTPGFPDSPYPAHARCQWALRGDADSVLSLTFRSFDLASCDERGSDLVTVYNTLSPMEPHALVQLCGTYPPSYNLTFHSSQNVLLITLITNTERRHPGFEATFFQLPRMSSCGGRLRKAQGTFNSPYYPGHYPPNIDCTWNIEVPNNQHVKVRFKFFYLLEPGVPAGTCPKDYVEINGEKYCGERSQFVVTSNSNKITVRFHSDQSYTDTGFLAEYLSYDSSDPCPGQFTCRTGRCIRKELRCDGWADCTDHSDELNCSCDAGHQFTCKNKFCKPLFWVCDSVNDCGDNSDEQGCSCPAQTFRCSNGKCLSKSQQCNGKDDCGDGSDEASCPKVNVVTCTKHTYRCLNGLCLSKGNPECDGKEDCSDGSDEKDCDCGLRSFTRQARVVGGTDADEGEWPWQVSLHALGQGHICGASLISPNWLVSAAHCYIDDRGFRYSDPTQWTAFLGLHDQSQRSAPGVQERRLKRIISHPFFNDATFDYDIALLELEKPAEYSSMVRPICLPDASHVFPAGKAIWVTGWGHTQYGGTGALILQKGEIRVINQTTCENLLPQQITPRMMCVGFLSGGVDSCQGDSGGPLSSVEADGRIFQAGVVSWGDGCAQRNKPGVYTRLPLFRDWIKENTGV

SEQ ID NO: 409 - protein, 855 aa, Homo sapiens
MGSDRARKGGGGPKDFGAGLKYNSRHEKVNGLEEGVEFLPVNNVKKVEKHGPGRWVVLAAVLIGLLLVLLGIGFLVWHLQYRDVRVQKVFNGYMRITNENFVDAYENSNSTEFVSLASKVKDALKLLYSGVPFLGPYHKESAVTAFSEGSVIAYYWSEFSIPQHLVEEAERVMAEERVVMLPPRARSLKSFVVTSVVAFPTDSKTVQRTQDNSCSFGLHARGVELMRFTTPGFPDSPYPAHARCQWALRGDADSVLSLTFRSFDLASCDERGSDLVTVYNTLSPMEPHALVQLCGTYPPSYNLTFHSSQNVLLITLITNTERRHPGFEATFFQLPRMSSCGGRLRKAQGTFNSPYYPGHYPPNIDCTWNIEVPNNQHVKVRFKFFYLLEPGVPAGTCPKDYVEINGEKYCGERSQFVVTSNSNKITVRFHSDQSYTDTGFLAEYLSYDSSDPCPGQFTCRTGRCIRKELRCDGWADCTDHSDELNCSCDAGHQFTCKNKFCKPLFWVCDSVNDCGDNSDEQGCSCPAQTFRCSNGKCLSKSQQCNGKDDCGDGSDEASCPKVNVVTCTKHTYRCLNGLCLSKGNPECDGKEDCSDGSDEKDCDCGLRSFTRQARVVGGTDADEGEWPWQVSLHALGQGHICGASLISPNWLVSAAHCYIDDRGFRYSDPTQWTAFLGLHDQSQRSAPGVQERRLKRIISHPFFNDWTFDYDIALLELEKPAEYSSMVRPICLPDASHVFPAGKAIWVTGWGHTQYGGTGALILQKGEIRVINQTTCENLLPQQITPRMMCVGFLSGGVDSCQGDSGGPLSSVEADGRIFQAGVVSWGDGCAQRNKPGVYTRLPLFRDWIKENTGV

SEQ ID NO: 410 - protein, 855 aa, Homo sapiens
MGSDRARKGGGGPKDFGAGLKYNSRHEKVNGLEEGVEFLPVNNVKKVEKHGPGRWVVLAAVLIGLLLVLLGIGFLVWHLQYRDVRVQKVFNGYMRITNENFVDAYENSNSTEFVSLASKVKDALKLLYSGVPFLGPYHKESAVTAFSEGSVIAYYWSEFSIPQHLVEEAERVMAEERVVMLPPRARSLKSFVVTSVVAFPTDSKTVQRTQDNSCSFGLHARGVELMRFTTPGFPDSPYPAHARCQWALRGDADSVLSLTFRSFDLASCDERGSDLVTVYNTLSPMEPHALVQLCGTYPPSYNLTFHSSQNVLLITLITNTERRHPGFEATFFQLPRMSSCGGRLRKAQGTFNSPYYPGHYPPNIDCTWNIEVPNNQHVKVRFKFFYLLEPGVPAGTCPKDYVEINGEKYCGERSQFVVTSNSNKITVRFHSDQSYTDTGFLAEYLSYDSSDPCPGQFTCRTGRCIRKELRCDGWADCTDHSDELNCSCDAGHQFTCKNKFCKPLFWVCDSVNDCGDNSDEQGCSCPAQTFRCSNGKCLSKSQQCNGKDDCGDGSDEASCPKVNVVTCTKHTYRCLNGLCLSKGNPECDGKEDCSDGSDEKDCDCGLRSFTRQARVVGGTDADEGEWPWQVSLHALGQGHICGASLISPNWLVSAAHCYIDDRGFRYSDPTQWTAFLGLHDQSQRSAPGVQERRLKRIISHPFFNDWTFDYDIALLELEKPAEYSSMVRPICLPDASHVFPAGKAIWVTGWGHTQNGGTGALILQKGEIRVINQTTCENLLPQQITPRMMCVGFLSGGVDSCQGDSGGPLSSVEADGRIFQAGVVSWGDGCAQRNKPGVYTRLPLFRDWIKENTGV

SEQ ID NO: 411 - protein, 855 aa, Homo sapiens
MGSDRARKGGGGPKDFGAGLKYNSRHEKVNGLEEGVEFLPVNNVKKVEKHGPGRWVVLAAVLIGLLLVLLGIGFLVWHLQYRDVRVQKVFNGYMRITNENFVDAYENSNSTEFVSLASKVKDALKLLYSGVPFLGPYHKESAVTAFSEGSVIAYYWSEFSIPQHLVEEAERVMAEERVVMLPPRARSLKSFVVTSVVAFPTDSKTVQRTQDNSCSFGLHARGVELMRFTTPGFPDSPYPAHARCQWALRGDADSVLSLTFRSFDLASCDERGSDLVTVYNTLSPMEPHALVQLCGTYPPSYNLTFHSSQNVLLITLITNTERRHPGFEATFFQLPRMSSCGGRLRKAQGTFNSPYYPGHYPPNIDCTWNIEVPNNQHVKVRFKFFYLLEPGVPAGTCPKDYVEINGEKYCGERSQFVVTSNSNKITVRFHSDQSYTDTGFLAEYLSYDSSDPCPGQFTCRTGRCIRKELRCDGWADCTDHSDELNCSCDAGHQFTCKNKFCKPLFWVCDSVNDCGDNSDEQGCSCPAQTFRCSNGKCLSKSQQCNGKDDCGDGSDEASCPKVNVVTCTKHTYRCLNGLCLSKGNPECDGKEDCSDGSDEKDCDCGLRSFTRQARVVGGTDADEGEWPWQVSLHALGQGHICGASLISPNWLVSAAHCYIDDRGFRYSDPTQWTAFLGLHDQSQRSAPGVQERRLKRIISHPFFNDWTFDYDIALLELEKPAEYSSMVRPICLPDASHVFPAGKAIWVTGWGHTQDGGTGALILQKGEIRVINQTTCENLLPQQITPRMMCVGFLSGGVDSCQGDSGGPLSSVEADGRIFQAGVVSWGDGCAQRNKPGVYTRLPLFRDWIKENTGV

SEQ ID NO: 412 - protein, 855 aa, Homo sapiens
MGSDRARKGGGGPKDFGAGLKYNSRHEKVNGLEEGVEFLPVNNVKKVEKHGPGRWVVLAAVLIGLLLVLLGIGFLVWHLQYRDVRVQKVFNGYMRITNENFVDAYENSNSTEFVSLASKVKDALKLLYSGVPFLGPYHKESAVTAFSEGSVIAYYWSEFSIPQHLVEEAERVMAEERVVMLPPRARSLKSFVVTSVVAFPTDSKTVQRTQDNSCSFGLHARGVELMRFTTPGFPDSPYPAHARCQWALRGDADSVLSLTFRSFDLASCDERGSDLVTVYNTLSPMEPHALVQLCGTYPPSYNLTFHSSQNVLLITLITNTERRHPGFEATFFQLPRMSSCGGRLRKAQGTFNSPYYPGHYPPNIDCTWNIEVPNNQHVKVRFKFFYLLEPGVPAGTCPKDYVEINGEKYCGERSQFVVTSNSNKITVRFHSDQSYTDTGFLAEYLSYDSSDPCPGQFTCRTGRCIRKELRCDGWADCTDHSDELNCSCDAGHQFTCKNKFCKPLFWVCDSVNDCGDNSDEQGCSCPAQTFRCSNGKCLSKSQQCNGKDDCGDGSDEASCPKVNVVTCTKHTYRCLNGLCLSKGNPECDGKEDCSDGSDEKDCDCGLRSFTRQARVVGGTDADEGEWPWQVSLHALGQGHICGASLISPNWLVSAAHCYIDDRGFRYSDPTQWTAFLGLHDQSQRSAPGVQERRLKRIISHPFFNDWTFDYDIALLELEKPAEYSSMVRPICLPDASHVFPAGKAIWVTGWGHTQEGGTGALILQKGEIRVINQTTCENLLPQQITPRMMCVGFLSGGVDSCQGDSGGPLSSVEADGRIFQAGVVSWGDGCAQRNKPGVYTRLPLFRDWIKENTGV

SEQ ID NO: 413 - protein, 855 aa, Homo sapiens
MGSDRARKGGGGPKDFGAGLKYNSRHEKVNGLEEGVEFLPVNNVKKVEKHGPGRWVVLAAVLIGLLLVLLGIGFLVWHLQYRDVRVQKVFNGYMRITNENFVDAYENSNSTEFVSLASKVKDALKLLYSGVPFLGPYHKESAVTAFSEGSVIAYYWSEFSIPQHLVEEAERVMAEERVVMLPPRARSLKSFVVTSVVAFPTDSKTVQRTQDNSCSFGLHARGVELMRFTTPGFPDSPYPAHARCQWALRGDADSVLSLTFRSFDLASCDERGSDLVTVYNTLSPMEPHALVQLCGTYPPSYNLTFHSSQNVLLITLITNTERRHPGFEATFFQLPRMSSCGGRLRKAQGTFNSPYYPGHYPPNIDCTWNIEVPNNQHVKVRFKFFYLLEPGVPAGTCPKDYVEINGEKYCGERSQFVVTSNSNKITVRFHSDQSYTDTGFLAEYLSYDSSDPCPGQFTCRTGRCIRKELRCDGWADCTDHSDELNCSCDAGHQFTCKNKFCKPLFWVCDSVNDCGDNSDEQGCSCPAQTFRCSNGKCLSKSQQCNGKDDCGDGSDEASCPKVNVVTCTKHTYRCLNGLCLSKGNPECDGKEDCSDGSDEKDCDCGLRSFTRQARVVGGTDADEGEWPWQVSLHALGQGHICGASLISPNWLVSAAHCYIDDRGFRYSDPTQWTAFLGLHDQSQRSAPGVQERRLKRIISHPFFNDWTFDYDIALLELEKPAEYSSMVRPICLPDASHVFPAGKAIWVTGWGHTQAGGTGALILQKGEIRVINQTTCENLLPQQITPRMMCVGFLSGGVDSCQGDSGGPLSSVEADGRIFQAGVVSWGDGCAQRNKPGVYTRLPLFRDWIKENTGV

SEQ ID NO: 414 - protein, 855 aa, Homo sapiens
MGSDRARKGGGGPKDFGAGLKYNSRHEKVNGLEEGVEFLPVNNVKKVEKHGPGRWVVLAAVLIGLLLVLLGIGFLVWHLQYRDVRVQKVFNGYMRITNENFVDAYENSNSTEFVSLASKVKDALKLLYSGVPFLGPYHKESAVTAFSEGSVIAYYWSEFSIPQHLVEEAERVMAEERVVMLPPRARSLKSFVVTSVVAFPTDSKTVQRTQDNSCSFGLHARGVELMRFTTPGFPDSPYPAHARCQWALRGDADSVLSLTFRSFDLASCDERGSDLVTVYNTLSPMEPHALVQLCGTYPPSYNLTFHSSQNVLLITLITNTERRHPGFEATFFQLPRMSSCGGRLRKAQGTFNSPYYPGHYPPNIDCTWNIEVPNNQHVKVRFKFFYLLEPGVPAGTCPKDYVEINGEKYCGERSQFVVTSNSNKITVRFHSDQSYTDTGFLAEYLSYDSSDPCPGQFTCRTGRCIRKELRCDGWADCTDHSDELNCSCDAGHQFTCKNKFCKPLFWVCDSVNDCGDNSDEQGCSCPAQTFRCSNGKCLSKSQQCNGKDDCGDGSDEASCPKVNVVTCTKHTYRCLNGLCLSKGNPECDGKEDCSDGSDEKDCDCGLRSFTRQARVVGGTDADEGEWPWQVSLHALGQGHICGASLISPNWLVSAAHCYIDDRGFRYSDPTQWTAFLGLHDQSQRSAPGVQERRLKRIISHPFFNDWTFDYDIALLELEKPAEYSSMVRPICLPDASHVFPAGKAIWVTGWGHTQWGGTGALILQKGEIRVINQTTCENLLPQQITPRMMCVGFLSGGVDSCQGDSGGPLSSVEADGRIFQAGVVSWGDGCAQRNKPGVYTRLPLFRDWIKENTGV

SEQ ID NO: 415 - protein, 855 aa, Homo sapiens
MGSDRARKGGGGPKDFGAGLKYNSRHEKVNGLEEGVEFLPVNNVKKVEKHGPGRWVVLAAVLIGLLLVLLGIGFLVWHLQYRDVRVQKVFNGYMRITNENFVDAYENSNSTEFVSLASKVKDALKLLYSGVPFLGPYHKESAVTAFSEGSVIAYYWSEFSIPQHLVEEAERVMAEERVVMLPPRARSLKSFVVTSVVAFPTDSKTVQRTQDNSCSFGLHARGVELMRFTTPGFPDSPYPAHARCQWALRGDADSVLSLTFRSFDLASCDERGSDLVTVYNTLSPMEPHALVQLCGTYPPSYNLTFHSSQNVLLITLITNTERRHPGFEATFFQLPRMSSCGGRLRKAQGTFNSPYYPGHYPPNIDCTWNIEVPNNQHVKVRFKFFYLLEPGVPAGTCPKDYVEINGEKYCGERSQFVVTSNSNKITVRFHSDQSYTDTGFLAEYLSYDSSDPCPGQFTCRTGRCIRKELRCDGWADCTDHSDELNCSCDAGHQFTCKNKFCKPLFWVCDSVNDCGDNSDEQGCSCPAQTFRCSNGKCLSKSQQCNGKDDCGDGSDEASCPKVNVVTCTKHTYRCLNGLCLSKGNPECDGKEDCSDGSDEKDCDCGLRSFTRQARVVGGTDADEGEWPWQVSLHALGQGHICGASLISPNWLVSAAHCYIDDRGFRYSDPTQWTAFLGLHDQSQRSAPGVQERRLKRIISHPFFNDWTFDYDIALLELEKPAEYSSMVRPICLPDASHVFPAGKAIWVTGWGHTQRGGTGALILQKGEIRVINQTTCENLLPQQITPRMMCVGFLSGGVDSCQGDSGGPLSSVEADGRIFQAGVVSWGDGCAQRNKPGVYTRLPLFRDWIKENTGV

SEQ ID NO: 416 - protein, 855 aa, Homo sapiens
MGSDRARKGGGGPKDFGAGLKYNSRHEKVNGLEEGVEFLPVNNVKKVEKHGPGRWVVLAAVLIGLLLVLLGIGFLVWHLQYRDVRVQKVFNGYMRITNENFVDAYENSNSTEFVSLASKVKDALKLLYSGVPFLGPYHKESAVTAFSEGSVIAYYWSEFSIPQHLVEEAERVMAEERVVMLPPRARSLKSFVVTSVVAFPTDSKTVQRTQDNSCSFGLHARGVELMRFTTPGFPDSPYPAHARCQWALRGDADSVLSLTFRSFDLASCDERGSDLVTVYNTLSPMEPHALVQLCGTYPPSYNLTFHSSQNVLLITLITNTERRHPGFEATFFQLPRMSSCGGRLRKAQGTFNSPYYPGHYPPNIDCTWNIEVPNNQHVKVRFKFFYLLEPGVPAGTCPKDYVEINGEKYCGERSQFVVTSNSNKITVRFHSDQSYTDTGFLAEYLSYDSSDPCPGQFTCRTGRCIRKELRCDGWADCTDHSDELNCSCDAGHQFTCKNKFCKPLFWVCDSVNDCGDNSDEQGCSCPAQTFRCSNGKCLSKSQQCNGKDDCGDGSDEASCPKVNVVTCTKHTYRCLNGLCLSKGNPECDGKEDCSDGSDEKDCDCGLRSFTRQARVVGGTDADEGEWPWQVSLHALGQGHICGASLISPNWLVSAAHCYIDDRGFRYSDPTQWTAFLGLHDQSQRSAPGVQERRLKRIISHPFFNDWTFDYDIALLELEKPAEYSSMVRPICLPDASHVFPAGKAIWVTGWGHTQRGGTGALILQKGEIRVINQTTCENLLPQQITPRMMCVGFLSGGVDSCRGDSGGPLSSVEADGRIFQAGVVSWGDGCAQRNKPGVYTRLPLFRDWIKENTGV

SEQ ID NO: 417 - protein, 855 aa, Homo sapiens
MGSDRARKGGGGPKDFGAGLKYNSRHEKVNGLEEGVEFLPVNNVKKVEKHGPGRWVVLAAVLIGLLLVLLGIGFLVWHLQYRDVRVQKVFNGYMRITNENFVDAYENSNSTEFVSLASKVKDALKLLYSGVPFLGPYHKESAVTAFSEGSVIAYYWSEFSIPQHLVEEAERVMAEERVVMLPPRARSLKSFVVTSVVAFPTDSKTVQRTQDNSCSFGLHARGVELMRFTTPGFPDSPYPAHARCQWALRGDADSVLSLTFRSFDLASCDERGSDLVTVYNTLSPMEPHALVQLCGTYPPSYNLTFHSSQNVLLITLITNTERRHPGFEATFFQLPRMSSCGGRLRKAQGTFNSPYYPGHYPPNIDCTWNIEVPNNQHVKVRFKFFYLLEPGVPAGTCPKDYVEINGEKYCGERSQFVVTSNSNKITVRFHSDQSYTDTGFLAEYLSYDSSDPCPGQFTCRTGRCIRKELRCDGWADCTDHSDELNCSCDAGHQFTCKNKFCKPLFWVCDSVNDCGDNSDEQGCSCPAQTFRCSNGKCLSKSQQCNGKDDCGDGSDEASCPKVNVVTCTKHTYRCLNGLCLSKGNPECDGKEDCSDGSDEKDCDCGLRSFTRQARVVGGTDADEGEWPWQVSLHALGQGHICGASLISPNWLVSAAHCYIDDRGFRYSDPTQWTAFLGLHDQSQRSAPGVQERRLKRIISHPFFNDWTFDYDIALLELEKPAEYSSMVRPICLPDASHVFPAGKAIWVTGWGHTQRGGTGALILQKGEIRVINQTTCENLLPQQITPRMMCVGFLSGGVDSCRGDSGGPLSSVEADGRIFQAGVVSWGDGCAQRNAPGVYTRLPLFRDWIKENTGV

SEQ ID NO: 418 - protein, 855 aa, Homo sapiens
MGSDRARKGGGGPKDFGAGLKYNSRHEKVNGLEEGVEFLPVNNVKKVEKHGPGRWVVLAAVLIGLLLVLLGIGFLVWHLQYRDVRVQKVFNGYMRITNENFVDAYENSNSTEFVSLASKVKDALKLLYSGVPFLGPYHKESAVTAFSEGSVIAYYWSEFSIPQHLVEEAERVMAEERVVMLPPRARSLKSFVVTSVVAFPTDSKTVQRTQDNSCSFGLHARGVELMRFTTPGFPDSPYPAHARCQWALRGDADSVLSLTFRSFDLASCDERGSDLVTVYNTLSPMEPHALVQLCGTYPPSYNLTFHSSQNVLLITLITNTERRHPGFEATFFQLPRMSSCGGRLRKAQGTFNSPYYPGHYPPNIDCTWNIEVPNNQHVKVRFKFFYLLEPGVPAGTCPKDYVEINGEKYCGERSQFVVTSNSNKITVRFHSDQSYTDTGFLAEYLSYDSSDPCPGQFTCRTGRCIRKELRCDGWADCTDHSDELNCSCDAGHQFTCKNKFCKPLFWVCDSVNDCGDNSDEQGCSCPAQTFRCSNGKCLSKSQQCNGKDDCGDGSDEASCPKVNVVTCTKHTYRCLNGLCLSKGNPECDGKEDCSDGSDEKDCDCGLRSFTRQARVVGGTDADEGEWPWQVSLHALGQGHICGASLISPNWLVSAAHCYIDDRGFRYSDPTQWTAFLGLHDQSQRSAPGVQERRLKRIISHPFFNDWTFDYDIALLELEKPAEYSSMVRPICLPDASHVFPAGKAIWVTGWGHTQRGGTGALILQKGEIRVINQTTCENLLPQQITPRMMCVGFLSGGVDSCRGDSGGPLSSVEADGRIFQAGVVSWGDGCAQRNFPGVYTRLPLFRDWIKENTGV

SEQ ID NO: 419 - protein, 855 aa, Homo sapiens
MGSDRARKGGGGPKDFGAGLKYNSRHEKVNGLEEGVEFLPVNNVKKVEKHGPGRWVVLAAVLIGLLLVLLGIGFLVWHLQYRDVRVQKVFNGYMRITNENFVDAYENSNSTEFVSLASKVKDALKLLYSGVPFLGPYHKESAVTAFSEGSVIAYYWSEFSIPQHLVEEAERVMAEERVVMLPPRARSLKSFVVTSVVAFPTDSKTVQRTQDNSCSFGLHARGVELMRFTTPGFPDSPYPAHARCQWALRGDADSVLSLTFRSFDLASCDERGSDLVTVYNTLSPMEPHALVQLCGTYPPSYNLTFHSSQNVLLITLITNTERRHPGFEATFFQLPRMSSCGGRLRKAQGTFNSPYYPGHYPPNIDCTWNIEVPNNQHVKVRFKFFYLLEPGVPAGTCPKDYVEINGEKYCGERSQFVVTSNSNKITVRFHSDQSYTDTGFLAEYLSYDSSDPCPGQFTCRTGRCIRKELRCDGWADCTDHSDELNCSCDAGHQFTCKNKFCKPLFWVCDSVNDCGDNSDEQGCSCPAQTFRCSNGKCLSKSQQCNGKDDCGDGSDEASCPKVNVVTCTKHTYRCLNGLCLSKGNPECDGKEDCSDGSDEKDCDCGLRSFTRQARVVGGTDADEGEWPWQVSLHALGQGHICGASLISPNWLVSAAHCYIDDRGFRYSDPTQWTAFLGLHDQSQRSAPGVQERRLKRIISHPFFNDFTFDYDIALLELEKPAEYSSMVRPICLPDASHVFPAGKAIWVTGWGHTQYGGTGALILQKGEIRVINQTTCENLLPHQITPRMMCVGFLSGGVDSCQGDSGGPLSSVEADGRIFQAGVVSWGDGCAQRNKPGVYTRLPLFRDWIKENTGV

SEQ ID NO: 420 - protein, 855 aa, Homo sapiens
MGSDRARKGGGGPKDFGAGLKYNSRHEKVNGLEEGVEFLPVNNVKKVEKHGPGRWVVLAAVLIGLLLVLLGIGFLVWHLQYRDVRVQKVFNGYMRITNENFVDAYENSNSTEFVSLASKVKDALKLLYSGVPFLGPYHKESAVTAFSEGSVIAYYWSEFSIPQHLVEEAERVMAEERVVMLPPRARSLKSFVVTSVVAFPTDSKTVQRTQDNSCSFGLHARGVELMRFTTPGFPDSPYPAHARCQWALRGDADSVLSLTFRSFDLASCDERGSDLVTVYNTLSPMEPHALVQLCGTYPPSYNLTFHSSQNVLLITLITNTERRHPGFEATFFQLPRMSSCGGRLRKAQGTFNSPYYPGHYPPNIDCTWNIEVPNNQHVKVRFKFFYLLEPGVPAGTCPKDYVEINGEKYCGERSQFVVTSNSNKITVRFHSDQSYTDTGFLAEYLSYDSSDPCPGQFTCRTGRCIRKELRCDGWADCTDHSDELNCSCDAGHQFTCKNKFCKPLFWVCDSVNDCGDNSDEQGCSCPAQTFRCSNGKCLSKSQQCNGKDDCGDGSDEASCPKVNVVTCTKHTYRCLNGLCLSKGNPECDGKEDCSDGSDEKDCDCGLRSFTRQARVVGGTDADEGEWPWQVSLHALGQGHICGASLISPNWLVSAAHCYIDDRGFRYSDPTQWTAFLGLHDQSQRSAPGVQERRLKRIISHPFFNDFTFDYDIALLELEKPAEYSSMVRPICLPDASHVFPAGKAIWVTGWGHTQYGGTGALILQKGEIRVINQTTCENLLPQQITPRMMCVGFLSGGVDSCQGDSGGPLSSVEADGRIFQAGVVSWGQGCAQRNKPGVYTRLPLFRDWIKENTGV

SEQ ID NO: 421 - protein, 855 aa, Homo sapiens
MGSDRARKGGGGPKDFGAGLKYNSRHEKVNGLEEGVEFLPVNNVKKVEKHGPGRWVVLAAVLIGLLLVLLGIGFLVWHLQYRDVRVQKVFNGYMRITNENFVDAYENSNSTEFVSLASKVKDALKLLYSGVPFLGPYHKESAVTAFSEGSVIAYYWSEFSIPQHLVEEAERVMAEERVVMLPPRARSLKSFVVTSVVAFPTDSKTVQRTQDNSCSFGLHARGVELMRFTTPGFPDSPYPAHARCQWALRGDADSVLSLTFRSFDLASCDERGSDLVTVYNTLSPMEPHALVQLCGTYPPSYNLTFHSSQNVLLITLITNTERRHPGFEATFFQLPRMSSCGGRLRKAQGTFNSPYYPGHYPPNIDCTWNIEVPNNQHVKVRFKFFYLLEPGVPAGTCPKDYVEINGEKYCGERSQFVVTSNSNKITVRFHSDQSYTDTGFLAEYLSYDSSDPCPGQFTCRTGRCIRKELRCDGWADCTDHSDELNCSCDAGHQFTCKNKFCKPLFWVCDSVNDCGDNSDEQGCSCPAQTFRCSNGKCLSKSQQCNGKDDCGDGSDEASCPKVNVVTCTKHTYRCLNGLCLSKGNPECDGKEDCSDGSDEKDCDCGLRSFTRQARVVGGTDADEGEWPWQVSLHALGQGHICGASLISPNWLVSAAHCYIDDRGFRYSDPTQWTAFLGLHDQSQRSAPGVQERRLKRIISHPFFNDFTFDYDIALLELEKPAEYSSMVRPICLPDASHVFPAGKAIWVTGWGHTQYGGTGALILQKGEIRVINQTTCENLLPQQITPRMMCVGFLSGGVDSCQGDSGGPLSSVEADGRIFQAGVVSWGNGCAQRNKPGVYTRLPLFRDWIKENTGV

SEQ ID NO: 422 - protein, 855 aa, Homo sapiens
MGSDRARKGGGGPKDFGAGLKYNSRHEKVNGLEEGVEFLPVNNVKKVEKHGPGRWVVLAAVLIGLLLVLLGIGFLVWHLQYRDVRVQKVFNGYMRITNENFVDAYENSNSTEFVSLASKVKDALKLLYSGVPFLGPYHKESAVTAFSEGSVIAYYWSEFSIPQHLVEEAERVMAEERVVMLPPRARSLKSFVVTSVVAFPTDSKTVQRTQDNSCSFGLHARGVELMRFTTPGFPDSPYPAHARCQWALRGDADSVLSLTFRSFDLASCDERGSDLVTVYNTLSPMEPHALVQLCGTYPPSYNLTFHSSQNVLLITLITNTERRHPGFEATFFQLPRMSSCGGRLRKAQGTFNSPYYPGHYPPNIDCTWNIEVPNNQHVKVRFKFFYLLEPGVPAGTCPKDYVEINGEKYCGERSQFVVTSNSNKITVRFHSDQSYTDTGFLAEYLSYDSSDPCPGQFTCRTGRCIRKELRCDGWADCTDHSDELNCSCDAGHQFTCKNKFCKPLFWVCDSVNDCGDNSDEQGCSCPAQTFRCSNGKCLSKSQQCNGKDDCGDGSDEASCPKVNVVTCTKHTYRCLNGLCLSKGNPECDGKEDCSDGSDEKDCDCGLRSFTRQARVVGGTDADEGEWPWQVSLHALGQGHICGASLISPNWLVSAAHCYIDDRGFRYSDPTQWTAFLGLHDQSQRSAPGVQERRLKRIISHPFFNDFTFDYDIALLELEKPAEYSSMVRPICLPDASHVFPAGKAIWVTGWGHTQYGGTGALILQKGEIRVINQTTCENLLPQQITPRMMCVGFLSGGVDSCQGDSGGPLSSVEADGRIFQAGVVSWGHGCAQRNKPGVYTRLPLFRDWIKENTGV

SEQ ID NO: 423 - protein, 855 aa, Homo sapiens
MGSDRARKGGGGPKDFGAGLKYNSRHEKVNGLEEGVEFLPVNNVKKVEKHGPGRWVVLAAVLIGLLLVLLGIGFLVWHLQYRDVRVQKVFNGYMRITNENFVDAYENSNSTEFVSLASKVKDALKLLYSGVPFLGPYHKESAVTAFSEGSVIAYYWSEFSIPQHLVEEAERVMAEERVVMLPPRARSLKSFVVTSVVAFPTDSKTVQRTQDNSCSFGLHARGVELMRFTTPGFPDSPYPAHARCQWALRGDADSVLSLTFRSFDLASCDERGSDLVTVYNTLSPMEPHALVQLCGTYPPSYNLTFHSSQNVLLITLITNTERRHPGFEATFFQLPRMSSCGGRLRKAQGTFNSPYYPGHYPPNIDCTWNIEVPNNQHVKVRFKFFYLLEPGVPAGTCPKDYVEINGEKYCGERSQFVVTSNSNKITVRFHSDQSYTDTGFLAEYLSYDSSDPCPGQFTCRTGRCIRKELRCDGWADCTDHSDELNCSCDAGHQFTCKNKFCKPLFWVCDSVNDCGDNSDEQGCSCPAQTFRCSNGKCLSKSQQCNGKDDCGDGSDEASCPKVNVVTCTKHTYRCLNGLCLSKGNPECDGKEDCSDGSDEKDCDCGLRSFTRQARVVGGTDADEGEWPWQVSLHALGQGHICGASLISPNWLVSAAHCYIDDRGFRYSDPTQWTAFLGLHDQSQRSAPGVQERRLKRIISHPFFNAFTFDYDIALLELEKPAEYSSMVRPICLPDASHVFPAGKAIWVTGWGHTQYGGTGALILQKGEIRVINQTTCENLLPQQITPRMMCVGFLSGGVDSCQGDSGGPLSSVEADGRIFQAGVVSWGDGCAQRNKPGVYTRLPLFRDWIKENTGV

SEQ ID NO: 424 - protein, 855 aa, Homo sapiens
MGSDRARKGGGGPKDFGAGLKYNSRHEKVNGLEEGVEFLPVNNVKKVEKHGPGRWVVLAAVLIGLLLVLLGIGFLVWHLQYRDVRVQKVFNGYMRITNENFVDAYENSNSTEFVSLASKVKDALKLLYSGVPFLGPYHKESAVTAFSEGSVIAYYWSEFSIPQHLVEEAERVMAEERVVMLPPRARSLKSFVVTSVVAFPTDSKTVQRTQDNSCSFGLHARGVELMRFTTPGFPDSPYPAHARCQWALRGDADSVLSLTFRSFDLASCDERGSDLVTVYNTLSPMEPHALVQLCGTYPPSYNLTFHSSQNVLLITLITNTERRHPGFEATFFQLPRMSSCGGRLRKAQGTFNSPYYPGHYPPNIDCTWNIEVPNNQHVKVRFKFFYLLEPGVPAGTCPKDYVEINGEKYCGERSQFVVTSNSNKITVRFHSDQSYTDTGFLAEYLSYDSSDPCPGQFTCRTGRCIRKELRCDGWADCTDHSDELNCSCDAGHQFTCKNKFCKPLFWVCDSVNDCGDNSDEQGCSCPAQTFRCSNGKCLSKSQQCNGKDDCGDGSDEASCPKVNVVTCTKHTYRCLNGLCLSKGNPECDGKEDCSDGSDEKDCDCGLRSFTRQARVVGGTDADEGEWPWQVSLHALGQGHICGASLISPNWLVSAAHCYIDDRGFRYSDPTQWTAFLGLHDQSQRSAPGVQERRLKRIISHPFFNVFTFDYDIALLELEKPAEYSSMVRPICLPDASHVFPAGKAIWVTGWGHTQYGGTGALILQKGEIRVINQTTCENLLPQQITPRMMCVGFLSGGVDSCQGDSGGPLSSVEADGRIFQAGVVSWGDGCAQRNKPGVYTRLPLFRDWIKENTGV

SEQ ID NO: 425 - protein, 855 aa, Homo sapiens
MGSDRARKGGGGPKDFGAGLKYNSRHEKVNGLEEGVEFLPVNNVKKVEKHGPGRWVVLAAVLIGLLLVLLGIGFLVWHLQYRDVRVQKVFNGYMRITNENFVDAYENSNSTEFVSLASKVKDALKLLYSGVPFLGPYHKESAVTAFSEGSVIAYYWSEFSIPQHLVEEAERVMAEERVVMLPPRARSLKSFVVTSVVAFPTDSKTVQRTQDNSCSFGLHARGVELMRFTTPGFPDSPYPAHARCQWALRGDADSVLSLTFRSFDLASCDERGSDLVTVYNTLSPMEPHALVQLCGTYPPSYNLTFHSSQNVLLITLITNTERRHPGFEATFFQLPRMSSCGGRLRKAQGTFNSPYYPGHYPPNIDCTWNIEVPNNQHVKVRFKFFYLLEPGVPAGTCPKDYVEINGEKYCGERSQFVVTSNSNKITVRFHSDQSYTDTGFLAEYLSYDSSDPCPGQFTCRTGRCIRKELRCDGWADCTDHSDELNCSCDAGHQFTCKNKFCKPLFWVCDSVNDCGDNSDEQGCSCPAQTFRCSNGKCLSKSQQCNGKDDCGDGSDEASCPKVNVVTCTKHTYRCLNGLCLSKGNPECDGKEDCSDGSDEKDCDCGLRSFTRQARVVGGTDADEGEWPWQVSLHALGQGHICGASLISPNWLVSAAHCYIDDRGFRYSDPTQWTAFLGLHDQSQRSAPGVQERRLKRIISHPFFNFFTFDYDIALLELEKPAEYSSMVRPICLPDASHVFPAGKAIWVTGWGHTQYGGTGALILQKGEIRVINQTTCENLLPQQITPRMMCVGFLSGGVDSCQGDSGGPLSSVEADGRIFQAGVVSWGDGCAQRNKPGVYTRLPLFRDWIKENTGV

SEQ ID NO: 426 - protein, 855 aa, Homo sapiens
MGSDRARKGGGGPKDFGAGLKYNSRHEKVNGLEEGVEFLPVNNVKKVEKHGPGRWVVLAAVLIGLLLVLLGIGFLVWHLQYRDVRVQKVFNGYMRITNENFVDAYENSNSTEFVSLASKVKDALKLLYSGVPFLGPYHKESAVTAFSEGSVIAYYWSEFSIPQHLVEEAERVMAEERVVMLPPRARSLKSFVVTSVVAFPTDSKTVQRTQDNSCSFGLHARGVELMRFTTPGFPDSPYPAHARCQWALRGDADSVLSLTFRSFDLASCDERGSDLVTVYNTLSPMEPHALVQLCGTYPPSYNLTFHSSQNVLLITLITNTERRHPGFEATFFQLPRMSSCGGRLRKAQGTFNSPYYPGHYPPNIDCTWNIEVPNNQHVKVRFKFFYLLEPGVPAGTCPKDYVEINGEKYCGERSQFVVTSNSNKITVRFHSDQSYTDTGFLAEYLSYDSSDPCPGQFTCRTGRCIRKELRCDGWADCTDHSDELNCSCDAGHQFTCKNKFCKPLFWVCDSVNDCGDNSDEQGCSCPAQTFRCSNGKCLSKSQQCNGKDDCGDGSDEASCPKVNVVTCTKHTYRCLNGLCLSKGNPECDGKEDCSDGSDEKDCDCGLRSFTRQARVVGGTDADEGEWPWQVSLHALGQGHICGASLISPNWLVSAAHCYIDDRGFRYSDPTQWTAFLGLHDQSQRSAPGVQERRLKRIISHPFFNSFTFDYDIALLELEKPAEYSSMVRPICLPDASHVFPAGKAIWVTGWGHTQYGGTGALILQKGEIRVINQTTCENLLPQQITPRMMCVGFLSGGVDSCQGDSGGPLSSVEADGRIFQAGVVSWGDGCAQRNKPGVYTRLPLFRDWIKENTGV

SEQ ID NO: 427 - protein, 855 aa, Homo sapiens
MGSDRARKGGGGPKDFGAGLKYNSRHEKVNGLEEGVEFLPVNNVKKVEKHGPGRWVVLAAVLIGLLLVLLGIGFLVWHLQYRDVRVQKVFNGYMRITNENFVDAYENSNSTEFVSLASKVKDALKLLYSGVPFLGPYHKESAVTAFSEGSVIAYYWSEFSIPQHLVEEAERVMAEERVVMLPPRARSLKSFVVTSVVAFPTDSKTVQRTQDNSCSFGLHARGVELMRFTTPGFPDSPYPAHARCQWALRGDADSVLSLTFRSFDLASCDERGSDLVTVYNTLSPMEPHALVQLCGTYPPSYNLTFHSSQNVLLITLITNTERRHPGFEATFFQLPRMSSCGGRLRKAQGTFNSPYYPGHYPPNIDCTWNIEVPNNQHVKVRFKFFYLLEPGVPAGTCPKDYVEINGEKYCGERSQFVVTSNSNKITVRFHSDQSYTDTGFLAEYLSYDSSDPCPGQFTCRTGRCIRKELRCDGWADCTDHSDELNCSCDAGHQFTCKNKFCKPLFWVCDSVNDCGDNSDEQGCSCPAQTFRCSNGKCLSKSQQCNGKDDCGDGSDEASCPKVNVVTCTKHTYRCLNGLCLSKGNPECDGKEDCSDGSDEKDCDCGLRSFTRQARVVGGTDADEGEWPWQVSLHALGQGHICGASLISPNWLVSAAHCYIDDRGFRYSDPTQWTAFLGLHDQSQRSAPGVQERRLKRIISHPFFNTFTFDYDIALLELEKPAEYSSMVRPICLPDASHVFPAGKAIWVTGWGHTQYGGTGALILQKGEIRVINQTTCENLLPQQITPRMMCVGFLSGGVDSCQGDSGGPLSSVEADGRIFQAGVVSWGDGCAQRNKPGVYTRLPLFRDWIKENTGV

SEQ ID NO: 428 - protein, 855 aa, Homo sapiens
MGSDRARKGGGGPKDFGAGLKYNSRHEKVNGLEEGVEFLPVNNVKKVEKHGPGRWVVLAAVLIGLLLVLLGIGFLVWHLQYRDVRVQKVFNGYMRITNENFVDAYENSNSTEFVSLASKVKDALKLLYSGVPFLGPYHKESAVTAFSEGSVIAYYWSEFSIPQHLVEEAERVMAEERVVMLPPRARSLKSFVVTSVVAFPTDSKTVQRTQDNSCSFGLHARGVELMRFTTPGFPDSPYPAHARCQWALRGDADSVLSLTFRSFDLASCDERGSDLVTVYNTLSPMEPHALVQLCGTYPPSYNLTFHSSQNVLLITLITNTERRHPGFEATFFQLPRMSSCGGRLRKAQGTFNSPYYPGHYPPNIDCTWNIEVPNNQHVKVRFKFFYLLEPGVPAGTCPKDYVEINGEKYCGERSQFVVTSNSNKITVRFHSDQSYTDTGFLAEYLSYDSSDPCPGQFTCRTGRCIRKELRCDGWADCTDHSDELNCSCDAGHQFTCKNKFCKPLFWVCDSVNDCGDNSDEQGCSCPAQTFRCSNGKCLSKSQQCNGKDDCGDGSDEASCPKVNVVTCTKHTYRCLNGLCLSKGNPECDGKEDCSDGSDEKDCDCGLRSFTRQARVVGGTDADEGEWPWQVSLHALGQGHICGASLISPNWLVSAAHCYIDDRGFRYSDPTQWTAFLGLHDQSQRSAPGVQERRLKRIISHPFFNDFTFDYDIALLELEKPAEYSSMVRPICLPDASHVFPAGKAIWVTGWGHTQYGGTGALILQKGEIRVINQTTCENLLPQQITPRMMCVGFLSGGVDSCLGDSGGPLSSVEADGRIFQAGVVSWGDGCAQRNKPGVYTRLPLFRDWIKENTGV

SEQ ID NO: 429 - protein, 855 aa, Homo sapiens
MGSDRARKGGGGPKDFGAGLKYNSRHEKVNGLEEGVEFLPVNNVKKVEKHGPGRWVVLAAVLIGLLLVLLGIGFLVWHLQYRDVRVQKVFNGYMRITNENFVDAYENSNSTEFVSLASKVKDALKLLYSGVPFLGPYHKESAVTAFSEGSVIAYYWSEFSIPQHLVEEAERVMAEERVVMLPPRARSLKSFVVTSVVAFPTDSKTVQRTQDNSCSFGLHARGVELMRFTTPGFPDSPYPAHARCQWALRGDADSVLSLTFRSFDLASCDERGSDLVTVYNTLSPMEPHALVQLCGTYPPSYNLTFHSSQNVLLITLITNTERRHPGFEATFFQLPRMSSCGGRLRKAQGTFNSPYYPGHYPPNIDCTWNIEVPNNQHVKVRFKFFYLLEPGVPAGTCPKDYVEINGEKYCGERSQFVVTSNSNKITVRFHSDQSYTDTGFLAEYLSYDSSDPCPGQFTCRTGRCIRKELRCDGWADCTDHSDELNCSCDAGHQFTCKNKFCKPLFWVCDSVNDCGDNSDEQGCSCPAQTFRCSNGKCLSKSQQCNGKDDCGDGSDEASCPKVNVVTCTKHTYRCLNGLCLSKGNPECDGKEDCSDGSDEKDCDCGLRSFTRQARVVGGTDADEGEWPWQVSLHALGQGHICGASLISPNWLVSAAHCYIDDRGFRYSDPTQWTAFLGLHDQSQRSAPGVQERRLKRIISHPFFNDFTFDYDIALLELEKPAEYSSMVRPICLPDASHVFPAGKAIWVTGWGHTQYGGTGALILQKGEIRVINQTTCENLLPQQITPRMMCVGFLSGGVDSCIGDSGGPLSSVEADGRIFQAGVVSWGDGCAQRNKPGVYTRLPLFRDWIKENTGV

SEQ ID NO: 430 - protein, 855 aa, Homo sapiens
MGSDRARKGGGGPKDFGAGLKYNSRHEKVNGLEEGVEFLPVNNVKKVEKHGPGRWVVLAAVLIGLLLVLLGIGFLVWHLQYRDVRVQKVFNGYMRITNENFVDAYENSNSTEFVSLASKVKDALKLLYSGVPFLGPYHKESAVTAFSEGSVIAYYWSEFSIPQHLVEEAERVMAEERVVMLPPRARSLKSFVVTSVVAFPTDSKTVQRTQDNSCSFGLHARGVELMRFTTPGFPDSPYPAHARCQWALRGDADSVLSLTFRSFDLASCDERGSDLVTVYNTLSPMEPHALVQLCGTYPPSYNLTFHSSQNVLLITLITNTERRHPGFEATFFQLPRMSSCGGRLRKAQGTFNSPYYPGHYPPNIDCTWNIEVPNNQHVKVRFKFFYLLEPGVPAGTCPKDYVEINGEKYCGERSQFVVTSNSNKITVRFHSDQSYTDTGFLAEYLSYDSSDPCPGQFTCRTGRCIRKELRCDGWADCTDHSDELNCSCDAGHQFTCKNKFCKPLFWVCDSVNDCGDNSDEQGCSCPAQTFRCSNGKCLSKSQQCNGKDDCGDGSDEASCPKVNVVTCTKHTYRCLNGLCLSKGNPECDGKEDCSDGSDEKDCDCGLRSFTRQARVVGGTDADEGEWPWQVSLHALGQGHICGASLISPNWLVSAAHCYIDDRGFRYSDPTQWTAFLGLHDQSQRSAPGVQERRLKRIISHPFFNDFTFDYDIALLELEKPAEYSSMVRPICLPDASHVFPAGKAIWVTGWGHTQYGGTGALILQKGEIRVINQTTCENLLPQQITPRMMCVGFLSGGVDSCFGDSGGPLSSVEADGRIFQAGVVSWGDGCAQRNKPGVYTRLPLFRDWIKENTGV

SEQ ID NO: 431 - protein, 855 aa, Homo sapiens
MGSDRARKGGGGPKDFGAGLKYNSRHEKVNGLEEGVEFLPVNNVKKVEKHGPGRWVVLAAVLIGLLLVLLGIGFLVWHLQYRDVRVQKVFNGYMRITNENFVDAYENSNSTEFVSLASKVKDALKLLYSGVPFLGPYHKESAVTAFSEGSVIAYYWSEFSIPQHLVEEAERVMAEERVVMLPPRARSLKSFVVTSVVAFPTDSKTVQRTQDNSCSFGLHARGVELMRFTTPGFPDSPYPAHARCQWALRGDADSVLSLTFRSFDLASCDERGSDLVTVYNTLSPMEPHALVQLCGTYPPSYNLTFHSSQNVLLITLITNTERRHPGFEATFFQLPRMSSCGGRLRKAQGTFNSPYYPGHYPPNIDCTWNIEVPNNQHVKVRFKFFYLLEPGVPAGTCPKDYVEINGEKYCGERSQFVVTSNSNKITVRFHSDQSYTDTGFLAEYLSYDSSDPCPGQFTCRTGRCIRKELRCDGWADCTDHSDELNCSCDAGHQFTCKNKFCKPLFWVCDSVNDCGDNSDEQGCSCPAQTFRCSNGKCLSKSQQCNGKDDCGDGSDEASCPKVNVVTCTKHTYRCLNGLCLSKGNPECDGKEDCSDGSDEKDCDCGLRSFTRQARVVGGTDADEGEWPWQVSLHALGQGHICGASLISPNWLVSAAHCYIDDRGFRYSDPTQWTAFLGLHDQSQRSAPGVQERRLKRIISHPFFNDFTFDYDIALLELEKPAEYSSMVRPICLPDASHVFPAGKAIWVTGWGHTQFGGTGALILQKGEIRVINQTTCENLLPQQITPRMMCVGFLSGGVDSCQGDSGGPLSSVEADGRIFQAGVVSWGDGCAQRNKPGVYTRLPLFRDWIKENTGV

SEQ ID NO: 432 - protein, 855 aa, Homo sapiens
MGSDRARKGGGGPKDFGAGLKYNSRHEKVNGLEEGVEFLPVNNVKKVEKHGPGRWVVLAAVLIGLLLVLLGIGFLVWHLQYRDVRVQKVFNGYMRITNENFVDAYENSNSTEFVSLASKVKDALKLLYSGVPFLGPYHKESAVTAFSEGSVIAYYWSEFSIPQHLVEEAERVMAEERVVMLPPRARSLKSFVVTSVVAFPTDSKTVQRTQDNSCSFGLHARGVELMRFTTPGFPDSPYPAHARCQWALRGDADSVLSLTFRSFDLASCDERGSDLVTVYNTLSPMEPHALVQLCGTYPPSYNLTFHSSQNVLLITLITNTERRHPGFEATFFQLPRMSSCGGRLRKAQGTFNSPYYPGHYPPNIDCTWNIEVPNNQHVKVRFKFFYLLEPGVPAGTCPKDYVEINGEKYCGERSQFVVTSNSNKITVRFHSDQSYTDTGFLAEYLSYDSSDPCPGQFTCRTGRCIRKELRCDGWADCTDHSDELNCSCDAGHQFTCKNKFCKPLFWVCDSVNDCGDNSDEQGCSCPAQTFRCSNGKCLSKSQQCNGKDDCGDGSDEASCPKVNVVTCTKHTYRCLNGLCLSKGNPECDGKEDCSDGSDEKDCDCGLRSFTRQARVVGGTDADEGEWPWQVSLHALGQGHICGASLISPNWLVSAAHCYIDDRGFRYSDPTQWTAFLGLHDQSQRSAPGVQERRLKRIISHPFFNDFTADYDIALLELEKPAEYSSMVRPICLPDASHVFPAGKAIWVTGWGHTQYGGTGALILQKGEIRVINQTTCENLLPQQITPRMMCVGFLSGGVDSCQGDSGGPLSSVEADGRIFQAGVVSWGDGCAQRNKPGVYTRLPLFRDWIKENTGV

SEQ ID NO: 433 - protein, 855 aa, Homo sapiens
MGSDRARKGGGGPKDFGAGLKYNSRHEKVNGLEEGVEFLPVNNVKKVEKHGPGRWVVLAAVLIGLLLVLLGIGFLVWHLQYRDVRVQKVFNGYMRITNENFVDAYENSNSTEFVSLASKVKDALKLLYSGVPFLGPYHKESAVTAFSEGSVIAYYWSEFSIPQHLVEEAERVMAEERVVMLPPRARSLKSFVVTSVVAFPTDSKTVQRTQDNSCSFGLHARGVELMRFTTPGFPDSPYPAHARCQWALRGDADSVLSLTFRSFDLASCDERGSDLVTVYNTLSPMEPHALVQLCGTYPPSYNLTFHSSQNVLLITLITNTERRHPGFEATFFQLPRMSSCGGRLRKAQGTFNSPYYPGHYPPNIDCTWNIEVPNNQHVKVRFKFFYLLEPGVPAGTCPKDYVEINGEKYCGERSQFVVTSNSNKITVRFHSDQSYTDTGFLAEYLSYDSSDPCPGQFTCRTGRCIRKELRCDGWADCTDHSDELNCSCDAGHQFTCKNKFCKPLFWVCDSVNDCGDNSDEQGCSCPAQTFRCSNGKCLSKSQQCNGKDDCGDGSDEASCPKVNVVTCTKHTYRCLNGLCLSKGNPECDGKEDCSDGSDEKDCDCGLRSFTRQARVVGGTDADEGEWPWQVSLHALGQGHICGASLISPNWLVSAAHCYIDDRGFRYSDPTQWTAFLGLHDQSQRSAPGVQERRLKRIISHPFFNDFTVDYDIALLELEKPAEYSSMVRPICLPDASHVFPAGKAIWVTGWGHTQYGGTGALILQKGEIRVINQTTCENLLPQQITPRMMCVGFLSGGVDSCQGDSGGPLSSVEADGRIFQAGVVSWGDGCAQRNKPGVYTRLPLFRDWIKENTGV

SEQ ID NO: 434 - protein, 855 aa, Homo sapiens
MGSDRARKGGGGPKDFGAGLKYNSRHEKVNGLEEGVEFLPVNNVKKVEKHGPGRWVVLAAVLIGLLLVLLGIGFLVWHLQYRDVRVQKVFNGYMRITNENFVDAYENSNSTEFVSLASKVKDALKLLYSGVPFLGPYHKESAVTAFSEGSVIAYYWSEFSIPQHLVEEAERVMAEERVVMLPPRARSLKSFVVTSVVAFPTDSKTVQRTQDNSCSFGLHARGVELMRFTTPGFPDSPYPAHARCQWALRGDADSVLSLTFRSFDLASCDERGSDLVTVYNTLSPMEPHALVQLCGTYPPSYNLTFHSSQNVLLITLITNTERRHPGFEATFFQLPRMSSCGGRLRKAQGTFNSPYYPGHYPPNIDCTWNIEVPNNQHVKVRFKFFYLLEPGVPAGTCPKDYVEINGEKYCGERSQFVVTSNSNKITVRFHSDQSYTDTGFLAEYLSYDSSDPCPGQFTCRTGRCIRKELRCDGWADCTDHSDELNCSCDAGHQFTCKNKFCKPLFWVCDSVNDCGDNSDEQGCSCPAQTFRCSNGKCLSKSQQCNGKDDCGDGSDEASCPKVNVVTCTKHTYRCLNGLCLSKGNPECDGKEDCSDGSDEKDCDCGLRSFTRQARVVGGTDADEGEWPWQVSLHALGQGHICGASLISPNWLVSAAHCYIDDRGFRYSDPTQWTAFLGLHDQSQRSAPGVQERRLKRIISHPFFNDFTSDYDIALLELEKPAEYSSMVRPICLPDASHVFPAGKAIWVTGWGHTQYGGTGALILQKGEIRVINQTTCENLLPQQITPRMMCVGFLSGGVDSCQGDSGGPLSSVEADGRIFQAGVVSWGDGCAQRNKPGVYTRLPLFRDWIKENTGV

SEQ ID NO: 435 - protein, 855 aa, Homo sapiens
MGSDRARKGGGGPKDFGAGLKYNSRHEKVNGLEEGVEFLPVNNVKKVEKHGPGRWVVLAAVLIGLLLVLLGIGFLVWHLQYRDVRVQKVFNGYMRITNENFVDAYENSNSTEFVSLASKVKDALKLLYSGVPFLGPYHKESAVTAFSEGSVIAYYWSEFSIPQHLVEEAERVMAEERVVMLPPRARSLKSFVVTSVVAFPTDSKTVQRTQDNSCSFGLHARGVELMRFTTPGFPDSPYPAHARCQWALRGDADSVLSLTFRSFDLASCDERGSDLVTVYNTLSPMEPHALVQLCGTYPPSYNLTFHSSQNVLLITLITNTERRHPGFEATFFQLPRMSSCGGRLRKAQGTFNSPYYPGHYPPNIDCTWNIEVPNNQHVKVRFKFFYLLEPGVPAGTCPKDYVEINGEKYCGERSQFVVTSNSNKITVRFHSDQSYTDTGFLAEYLSYDSSDPCPGQFTCRTGRCIRKELRCDGWADCTDHSDELNCSCDAGHQFTCKNKFCKPLFWVCDSVNDCGDNSDEQGCSCPAQTFRCSNGKCLSKSQQCNGKDDCGDGSDEASCPKVNVVTCTKHTYRCLNGLCLSKGNPECDGKEDCSDGSDEKDCDCGLRSFTRQARVVGGTDADEGEWPWQVSLHALGQGHICGASLISPNWLVSAAHCYIDDRGFRYSDPTQWTAFLGLHDQSQRSAPGVQERRLKRIISHPFFNDFTGDYDIALLELEKPAEYSSMVRPICLPDASHVFPAGKAIWVTGWGHTQYGGTGALILQKGEIRVINQTTCENLLPQQITPRMMCVGFLSGGVDSCQGDSGGPLSSVEADGRIFQAGVVSWGDGCAQRNKPGVYTRLPLFRDWIKENTGV

SEQ ID NO: 436 - protein, 855 aa, Homo sapiens
MGSDRARKGGGGPKDFGAGLKYNSRHEKVNGLEEGVEFLPVNNVKKVEKHGPGRWVVLAAVLIGLLLVLLGIGFLVWHLQYRDVRVQKVFNGYMRITNENFVDAYENSNSTEFVSLASKVKDALKLLYSGVPFLGPYHKESAVTAFSEGSVIAYYWSEFSIPQHLVEEAERVMAEERVVMLPPRARSLKSFVVTSVVAFPTDSKTVQRTQDNSCSFGLHARGVELMRFTTPGFPDSPYPAHARCQWALRGDADSVLSLTFRSFDLASCDERGSDLVTVYNTLSPMEPHALVQLCGTYPPSYNLTFHSSQNVLLITLITNTERRHPGFEATFFQLPRMSSCGGRLRKAQGTFNSPYYPGHYPPNIDCTWNIEVPNNQHVKVRFKFFYLLEPGVPAGTCPKDYVEINGEKYCGERSQFVVTSNSNKITVRFHSDQSYTDTGFLAEYLSYDSSDPCPGQFTCRTGRCIRKELRCDGWADCTDHSDELNCSCDAGHQFTCKNKFCKPLFWVCDSVNDCGDNSDEQGCSCPAQTFRCSNGKCLSKSQQCNGKDDCGDGSDEASCPKVNVVTCTKHTYRCLNGLCLSKGNPECDGKEDCSDGSDEKDCDCGLRSFTRQARVVGGTDADEGEWPWQVSLHALGQGHICGASLISPNWLVSAAHCYIDDRGFRYSDPTQWTAFLGLHDQSQRSAPGVQERRLKRIISHPFFNDFTFDYDIALLELEKPAEYSSMVRPICLPDASHVFPAGKAIWVTGWGHTQYGGTGALILQKGEIRVINQTTCENLLPQQITPRMMCVGFLSGGVDSCQGDSGGPLSSVEADGRIFQAGVVSFGDGCAQRNKPGVYTRLPLFRDWIKENTGV

SEQ ID NO: 437 - protein, 855 aa, Homo sapiens
MGSDRARKGGGGPKDFGAGLKYNSRHEKVNGLEEGVEFLPVNNVKKVEKHGPGRWVVLAAVLIGLLLVLLGIGFLVWHLQYRDVRVQKVFNGYMRITNENFVDAYENSNSTEFVSLASKVKDALKLLYSGVPFLGPYHKESAVTAFSEGSVIAYYWSEFSIPQHLVEEAERVMAEERVVMLPPRARSLKSFVVTSVVAFPTDSKTVQRTQDNSCSFGLHARGVELMRFTTPGFPDSPYPAHARCQWALRGDADSVLSLTFRSFDLASCDERGSDLVTVYNTLSPMEPHALVQLCGTYPPSYNLTFHSSQNVLLITLITNTERRHPGFEATFFQLPRMSSCGGRLRKAQGTFNSPYYPGHYPPNIDCTWNIEVPNNQHVKVRFKFFYLLEPGVPAGTCPKDYVEINGEKYCGERSQFVVTSNSNKITVRFHSDQSYTDTGFLAEYLSYDSSDPCPGQFTCRTGRCIRKELRCDGWADCTDHSDELNCSCDAGHQFTCKNKFCKPLFWVCDSVNDCGDNSDEQGCSCPAQTFRCSNGKCLSKSQQCNGKDDCGDGSDEASCPKVNVVTCTKHTYRCLNGLCLSKGNPECDGKEDCSDGSDEKDCDCGLRSFTRQARVVGGTDADEGEWPWQVSLHALGQGHICGASLISPNWLVSAAHCYIDDRGFRYSDPTQWTAFLGLHDQSQRSAPGVQERRLKRIISHPFFNDFTFDYDIALLELEKPAEYSSMVRPICLPDASHVFPAGKAIWVTGWGHTQYGGTGALILQKGEIRVINQTTCENLLPQQITPRMMCVGFLSGGVDSCQGDSGGPLSSVEADGRIFQAGVVSYGDGCAQRNKPGVYTRLPLFRDWIKENTGV

SEQ ID NO: 438 - protein, 855 aa, Homo sapiens
MGSDRARKGGGGPKDFGAGLKYNSRHEKVNGLEEGVEFLPVNNVKKVEKHGPGRWVVLAAVLIGLLLVLLGIGFLVWHLQYRDVRVQKVFNGYMRITNENFVDAYENSNSTEFVSLASKVKDALKLLYSGVPFLGPYHKESAVTAFSEGSVIAYYWSEFSIPQHLVEEAERVMAEERVVMLPPRARSLKSFVVTSVVAFPTDSKTVQRTQDNSCSFGLHARGVELMRFTTPGFPDSPYPAHARCQWALRGDADSVLSLTFRSFDLASCDERGSDLVTVYNTLSPMEPHALVQLCGTYPPSYNLTFHSSQNVLLITLITNTERRHPGFEATFFQLPRMSSCGGRLRKAQGTFNSPYYPGHYPPNIDCTWNIEVPNNQHVKVRFKFFYLLEPGVPAGTCPKDYVEINGEKYCGERSQFVVTSNSNKITVRFHSDQSYTDTGFLAEYLSYDSSDPCPGQFTCRTGRCIRKELRCDGWADCTDHSDELNCSCDAGHQFTCKNKFCKPLFWVCDSVNDCGDNSDEQGCSCPAQTFRCSNGKCLSKSQQCNGKDDCGDGSDEASCPKVNVVTCTKHTYRCLNGLCLSKGNPECDGKEDCSDGSDEKDCDCGLRSFTRQARVVGGTDADEGEWPWQVSLHALGQGHICGASLISPNWLVSAAHCYIDDRGFRYSDPTQWTAFLGLHDQSQRSAPGVQERRLKRIISHPFFNDFTFDYDIALLELEKPAEYSSMVRPICLPDASHVFPAGKAIWVTGWGHTQYGGTGALILQKGEIRVINQTTCENLLPAQITPRMMCVGFLSGGVDSCQGDSGGPLSSVEADGRIFQAGVVSWGDGCAQRNKPGVYTRLPLFRDWIKENTGV

SEQ ID NO: 439 - protein, 855 aa, Homo sapiens
MGSDRARKGGGGPKDFGAGLKYNSRHEKVNGLEEGVEFLPVNNVKKVEKHGPGRWVVLAAVLIGLLLVLLGIGFLVWHLQYRDVRVQKVFNGYMRITNENFVDAYENSNSTEFVSLASKVKDALKLLYSGVPFLGPYHKESAVTAFSEGSVIAYYWSEFSIPQHLVEEAERVMAEERVVMLPPRARSLKSFVVTSVVAFPTDSKTVQRTQDNSCSFGLHARGVELMRFTTPGFPDSPYPAHARCQWALRGDADSVLSLTFRSFDLASCDERGSDLVTVYNTLSPMEPHALVQLCGTYPPSYNLTFHSSQNVLLITLITNTERRHPGFEATFFQLPRMSSCGGRLRKAQGTFNSPYYPGHYPPNIDCTWNIEVPNNQHVKVRFKFFYLLEPGVPAGTCPKDYVEINGEKYCGERSQFVVTSNSNKITVRFHSDQSYTDTGFLAEYLSYDSSDPCPGQFTCRTGRCIRKELRCDGWADCTDHSDELNCSCDAGHQFTCKNKFCKPLFWVCDSVNDCGDNSDEQGCSCPAQTFRCSNGKCLSKSQQCNGKDDCGDGSDEASCPKVNVVTCTKHTYRCLNGLCLSKGNPECDGKEDCSDGSDEKDCDCGLRSFTRQARVVGGTDADEGEWPWQVSLHALGQGHICGASLISPNWLVSAAHCYIDDRGFRYSDPTQWTAFLGLHDQSQRSAPGVQERRLKRIISHPFFNDFTFDYDIALLELEKPAEYSSMVRPICLPDASHVFPAGKAIWVTGWGHTQYGGTGALILQKGEIRVINQTTCENLLPVQITPRMMCVGFLSGGVDSCQGDSGGPLSSVEADGRIFQAGVVSWGDGCAQRNKPGVYTRLPLFRDWIKENTGV

SEQ ID NO: 440 - protein, 855 aa, Homo sapiens
MGSDRARKGGGGPKDFGAGLKYNSRHEKVNGLEEGVEFLPVNNVKKVEKHGPGRWVVLAAVLIGLLLVLLGIGFLVWHLQYRDVRVQKVFNGYMRITNENFVDAYENSNSTEFVSLASKVKDALKLLYSGVPFLGPYHKESAVTAFSEGSVIAYYWSEFSIPQHLVEEAERVMAEERVVMLPPRARSLKSFVVTSVVAFPTDSKTVQRTQDNSCSFGLHARGVELMRFTTPGFPDSPYPAHARCQWALRGDADSVLSLTFRSFDLASCDERGSDLVTVYNTLSPMEPHALVQLCGTYPPSYNLTFHSSQNVLLITLITNTERRHPGFEATFFQLPRMSSCGGRLRKAQGTFNSPYYPGHYPPNIDCTWNIEVPNNQHVKVRFKFFYLLEPGVPAGTCPKDYVEINGEKYCGERSQFVVTSNSNKITVRFHSDQSYTDTGFLAEYLSYDSSDPCPGQFTCRTGRCIRKELRCDGWADCTDHSDELNCSCDAGHQFTCKNKFCKPLFWVCDSVNDCGDNSDEQGCSCPAQTFRCSNGKCLSKSQQCNGKDDCGDGSDEASCPKVNVVTCTKHTYRCLNGLCLSKGNPECDGKEDCSDGSDEKDCDCGLRSFTRQARVVGGTDADEGEWPWQVSLHALGQGHICGASLISPNWLVSAAHCYIDDRGFRYSDPTQWTAFLGLHDQSQRSAPGVQERRLKRIISHPFFNDFTFDYDIALLELEKPAEYSSMVRPICLPDASHVFPAGKAIWVTGWGHTQYGGTGALILQKGEIRVINQTTCENLLPFQITPRMMCVGFLSGGVDSCQGDSGGPLSSVEADGRIFQAGVVSWGDGCAQRNKPGVYTRLPLFRDWIKENTGV

SEQ ID NO: 441 - protein, 855 aa, Homo sapiens
MGSDRARKGGGGPKDFGAGLKYNSRHEKVNGLEEGVEFLPVNNVKKVEKHGPGRWVVLAAVLIGLLLVLLGIGFLVWHLQYRDVRVQKVFNGYMRITNENFVDAYENSNSTEFVSLASKVKDALKLLYSGVPFLGPYHKESAVTAFSEGSVIAYYWSEFSIPQHLVEEAERVMAEERVVMLPPRARSLKSFVVTSVVAFPTDSKTVQRTQDNSCSFGLHARGVELMRFTTPGFPDSPYPAHARCQWALRGDADSVLSLTFRSFDLASCDERGSDLVTVYNTLSPMEPHALVQLCGTYPPSYNLTFHSSQNVLLITLITNTERRHPGFEATFFQLPRMSSCGGRLRKAQGTFNSPYYPGHYPPNIDCTWNIEVPNNQHVKVRFKFFYLLEPGVPAGTCPKDYVEINGEKYCGERSQFVVTSNSNKITVRFHSDQSYTDTGFLAEYLSYDSSDPCPGQFTCRTGRCIRKELRCDGWADCTDHSDELNCSCDAGHQFTCKNKFCKPLFWVCDSVNDCGDNSDEQGCSCPAQTFRCSNGKCLSKSQQCNGKDDCGDGSDEASCPKVNVVTCTKHTYRCLNGLCLSKGNPECDGKEDCSDGSDEKDCDCGLRSFTRQARVVGGTDADEGEWPWQVSLHALGQGHICGASLISPNWLVSAAHCYIDDRGFRYSDPTQWTAFLGLHDQSQRSAPGVQERRLKRIISHPFFNDFTFDYDIALLELEKPAEYSSMVRPICLPDASHVFPAGKAIWVTGWGHTQYGGTGALILQKGEIRVINQTTCENLLPRQITPRMMCVGFLSGGVDSCQGDSGGPLSSVEADGRIFQAGVVSWGDGCAQRNKPGVYTRLPLFRDWIKENTGV

SEQ ID NO: 442 - protein, 855 aa, Homo sapiens
MGSDRARKGGGGPKDFGAGLKYNSRHEKVNGLEEGVEFLPVNNVKKVEKHGPGRWVVLAAVLIGLLLVLLGIGFLVWHLQYRDVRVQKVFNGYMRITNENFVDAYENSNSTEFVSLASKVKDALKLLYSGVPFLGPYHKESAVTAFSEGSVIAYYWSEFSIPQHLVEEAERVMAEERVVMLPPRARSLKSFVVTSVVAFPTDSKTVQRTQDNSCSFGLHARGVELMRFTTPGFPDSPYPAHARCQWALRGDADSVLSLTFRSFDLASCDERGSDLVTVYNTLSPMEPHALVQLCGTYPPSYNLTFHSSQNVLLITLITNTERRHPGFEATFFQLPRMSSCGGRLRKAQGTFNSPYYPGHYPPNIDCTWNIEVPNNQHVKVRFKFFYLLEPGVPAGTCPKDYVEINGEKYCGERSQFVVTSNSNKITVRFHSDQSYTDTGFLAEYLSYDSSDPCPGQFTCRTGRCIRKELRCDGWADCTDHSDELNCSCDAGHQFTCKNKFCKPLFWVCDSVNDCGDNSDEQGCSCPAQTFRCSNGKCLSKSQQCNGKDDCGDGSDEASCPKVNVVTCTKHTYRCLNGLCLSKGNPECDGKEDCSDGSDEKDCDCGLRSFTRQARVVGGTDADEGEWPWQVSLHALGQGHICGASLISPNWLVSAAHCYIDDRGFRYSDPTQWTAFLGLHDQSQRSAPGVQERRLKRIISHPFFNDFTFDYDIALLELEKPAEYSSMVRPICLPDASHVFPAGKAIWVTGWGHTQYGGTGALILQKGEIRVINQTTCENLLPKQITPRMMCVGFLSGGVDSCQGDSGGPLSSVEADGRIFQAGVVSWGDGCAQRNKPGVYTRLPLFRDWIKENTGV

SEQ ID NO: 443 - protein, 855 aa, Homo sapiens
MGSDRARKGGGGPKDFGAGLKYNSRHEKVNGLEEGVEFLPVNNVKKVEKHGPGRWVVLAAVLIGLLLVLLGIGFLVWHLQYRDVRVQKVFNGYMRITNENFVDAYENSNSTEFVSLASKVKDALKLLYSGVPFLGPYHKESAVTAFSEGSVIAYYWSEFSIPQHLVEEAERVMAEERVVMLPPRARSLKSFVVTSVVAFPTDSKTVQRTQDNSCSFGLHARGVELMRFTTPGFPDSPYPAHARCQWALRGDADSVLSLTFRSFDLASCDERGSDLVTVYNTLSPMEPHALVQLCGTYPPSYNLTFHSSQNVLLITLITNTERRHPGFEATFFQLPRMSSCGGRLRKAQGTFNSPYYPGHYPPNIDCTWNIEVPNNQHVKVRFKFFYLLEPGVPAGTCPKDYVEINGEKYCGERSQFVVTSNSNKITVRFHSDQSYTDTGFLAEYLSYDSSDPCPGQFTCRTGRCIRKELRCDGWADCTDHSDELNCSCDAGHQFTCKNKFCKPLFWVCDSVNDCGDNSDEQGCSCPAQTFRCSNGKCLSKSQQCNGKDDCGDGSDEASCPKVNVVTCTKHTYRCLNGLCLSKGNPECDGKEDCSDGSDEKDCDCGLRSFTRQARVVGGTDADEGEWPWQVSLHALGQGHICGASLISPNWLVSAAHCYIDDRGFRYSDPTQWTAFLGLHDQSQRSAPGVQERRLKRIISHPFFNDFTFDYDIALLELEKPAEYSSMVRPICLPDASHVFPAGKAIWVTGWGHTQYGGTGALILQKGEIRVINQTTCENLLPQQITPRMMCVGFLSGGVDSCQGDSGGPLSSVEADGRIFQAGVVSWGAGCAQRNKPGVYTRLPLFRDWIKENTGV

SEQ ID NO: 444 - protein, 855 aa, Homo sapiens
MGSDRARKGGGGPKDFGAGLKYNSRHEKVNGLEEGVEFLPVNNVKKVEKHGPGRWVVLAAVLIGLLLVLLGIGFLVWHLQYRDVRVQKVFNGYMRITNENFVDAYENSNSTEFVSLASKVKDALKLLYSGVPFLGPYHKESAVTAFSEGSVIAYYWSEFSIPQHLVEEAERVMAEERVVMLPPRARSLKSFVVTSVVAFPTDSKTVQRTQDNSCSFGLHARGVELMRFTTPGFPDSPYPAHARCQWALRGDADSVLSLTFRSFDLASCDERGSDLVTVYNTLSPMEPHALVQLCGTYPPSYNLTFHSSQNVLLITLITNTERRHPGFEATFFQLPRMSSCGGRLRKAQGTFNSPYYPGHYPPNIDCTWNIEVPNNQHVKVRFKFFYLLEPGVPAGTCPKDYVEINGEKYCGERSQFVVTSNSNKITVRFHSDQSYTDTGFLAEYLSYDSSDPCPGQFTCRTGRCIRKELRCDGWADCTDHSDELNCSCDAGHQFTCKNKFCKPLFWVCDSVNDCGDNSDEQGCSCPAQTFRCSNGKCLSKSQQCNGKDDCGDGSDEASCPKVNVVTCTKHTYRCLNGLCLSKGNPECDGKEDCSDGSDEKDCDCGLRSFTRQARVVGGTDADEGEWPWQVSLHALGQGHICGASLISPNWLVSAAHCYIDDRGFRYSDPTQWTAFLGLHDQSQRSAPGVQERRLKRIISHPFFNDFTFDYDIALLELEKPAEYSSMVRPICLPDASHVFPAGKAIWVTGWGHTQYGGTGALILQKGEIRVINQTTCENLLPQQITPRMMCVGFLSGGVDSCQGDSGGPLSSVEADGRIFQAGVVSWGVGCAQRNKPGVYTRLPLFRDWIKENTGV

SEQ ID NO: 445 - protein, 855 aa, Homo sapiens
MGSDRARKGGGGPKDFGAGLKYNSRHEKVNGLEEGVEFLPVNNVKKVEKHGPGRWVVLAAVLIGLLLVLLGIGFLVWHLQYRDVRVQKVFNGYMRITNENFVDAYENSNSTEFVSLASKVKDALKLLYSGVPFLGPYHKESAVTAFSEGSVIAYYWSEFSIPQHLVEEAERVMAEERVVMLPPRARSLKSFVVTSVVAFPTDSKTVQRTQDNSCSFGLHARGVELMRFTTPGFPDSPYPAHARCQWALRGDADSVLSLTFRSFDLASCDERGSDLVTVYNTLSPMEPHALVQLCGTYPPSYNLTFHSSQNVLLITLITNTERRHPGFEATFFQLPRMSSCGGRLRKAQGTFNSPYYPGHYPPNIDCTWNIEVPNNQHVKVRFKFFYLLEPGVPAGTCPKDYVEINGEKYCGERSQFVVTSNSNKITVRFHSDQSYTDTGFLAEYLSYDSSDPCPGQFTCRTGRCIRKELRCDGWADCTDHSDELNCSCDAGHQFTCKNKFCKPLFWVCDSVNDCGDNSDEQGCSCPAQTFRCSNGKCLSKSQQCNGKDDCGDGSDEASCPKVNVVTCTKHTYRCLNGLCLSKGNPECDGKEDCSDGSDEKDCDCGLRSFTRQARVVGGTDADEGEWPWQVSLHALGQGHICGASLISPNWLVSAAHCYIDDRGFRYSDPTQWTAFLGLHDQSQRSAPGVQERRLKRIISHPFFNDFTFDYDIALLELEKPAEYSSMVRPICLPDASHVFPAGKAIWVTGWGHTQYGGTGALILQKGEIRVINQTTCENLLPQQITPRMMCVGFLSGGVDSCEGDSGGPLSSVEADGRIFQAGVVSWGDGCAQRNKPGVYTRLPLFRDWIKENTGV

SEQ ID NO: 446 - protein, 855 aa, Homo sapiens
MGSDRARKGGGGPKDFGAGLKYNSRHEKVNGLEEGVEFLPVNNVKKVEKHGPGRWVVLAAVLIGLLLVLLGIGFLVWHLQYRDVRVQKVFNGYMRITNENFVDAYENSNSTEFVSLASKVKDALKLLYSGVPFLGPYHKESAVTAFSEGSVIAYYWSEFSIPQHLVEEAERVMAEERVVMLPPRARSLKSFVVTSVVAFPTDSKTVQRTQDNSCSFGLHARGVELMRFTTPGFPDSPYPAHARCQWALRGDADSVLSLTFRSFDLASCDERGSDLVTVYNTLSPMEPHALVQLCGTYPPSYNLTFHSSQNVLLITLITNTERRHPGFEATFFQLPRMSSCGGRLRKAQGTFNSPYYPGHYPPNIDCTWNIEVPNNQHVKVRFKFFYLLEPGVPAGTCPKDYVEINGEKYCGERSQFVVTSNSNKITVRFHSDQSYTDTGFLAEYLSYDSSDPCPGQFTCRTGRCIRKELRCDGWADCTDHSDELNCSCDAGHQFTCKNKFCKPLFWVCDSVNDCGDNSDEQGCSCPAQTFRCSNGKCLSKSQQCNGKDDCGDGSDEASCPKVNVVTCTKHTYRCLNGLCLSKGNPECDGKEDCSDGSDEKDCDCGLRSFTRQARVVGGTDADEGEWPWQVSLHALGQGHICGASLISPNWLVSAAHCYIDDRGFRYSDPTQWTAFLGLHDQSQRSAPGVQERRLKRIISHPFFNDFTWDYDIALLELEKPAEYSSMVRPICLPDASHVFPAGKAIWVTGWGHTQYGGTGALILQKGEIRVINQTTCENLLPQQITPRMMCVGFLSGGVDSCQGDSGGPLSSVEADGRIFQAGVVSWGDGCAQRNKPGVYTRLPLFRDWIKENTGV

SEQ ID NO: 447 - protein, 855 aa, Homo sapiens
MGSDRARKGGGGPKDFGAGLKYNSRHEKVNGLEEGVEFLPVNNVKKVEKHGPGRWVVLAAVLIGLLLVLLGIGFLVWHLQYRDVRVQKVFNGYMRITNENFVDAYENSNSTEFVSLASKVKDALKLLYSGVPFLGPYHKESAVTAFSEGSVIAYYWSEFSIPQHLVEEAERVMAEERVVMLPPRARSLKSFVVTSVVAFPTDSKTVQRTQDNSCSFGLHARGVELMRFTTPGFPDSPYPAHARCQWALRGDADSVLSLTFRSFDLASCDERGSDLVTVYNTLSPMEPHALVQLCGTYPPSYNLTFHSSQNVLLITLITNTERRHPGFEATFFQLPRMSSCGGRLRKAQGTFNSPYYPGHYPPNIDCTWNIEVPNNQHVKVRFKFFYLLEPGVPAGTCPKDYVEINGEKYCGERSQFVVTSNSNKITVRFHSDQSYTDTGFLAEYLSYDSSDPCPGQFTCRTGRCIRKELRCDGWADCTDHSDELNCSCDAGHQFTCKNKFCKPLFWVCDSVNDCGDNSDEQGCSCPAQTFRCSNGKCLSKSQQCNGKDDCGDGSDEASCPKVNVVTCTKHTYRCLNGLCLSKGNPECDGKEDCSDGSDEKDCDCGLRSFTRQARVVGGTDADEGEWPWQVSLHALGQGHICGASLISPNWLVSAAHCYIDDRGFRYSDPTQWTAFLGLHDQSQRSAPGVQERRLKRIISHPFFNDFTYDYDIALLELEKPAEYSSMVRPICLPDASHVFPAGKAIWVTGWGHTQYGGTGALILQKGEIRVINQTTCENLLPQQITPRMMCVGFLSGGVDSCQGDSGGPLSSVEADGRIFQAGVVSWGDGCAQRNKPGVYTRLPLFRDWIKENTGV

SEQ ID NO: 448 - protein, 855 aa, Homo Sapiens [sequence omitted]

SEQ ID NO: 449 - protein, 855 aa, Mus musculus
MGSNRGRKAGGGSQDFGAGLKYNSRLENMNGFEEGVEFLPANNAKKVEKRGPRRWVVLVAVLFSFLLLSLMAGLLVWHFHYRNVRVQKVFNGHLRITNEIFLDAYENSTSTEFISLASQVKEALKLLYNEVPVLGPYHKKSAVTAFSEGSVIAYYWSEFSIPPHLAEEVDRAMAVERVVTLPPRARALKSFVLTSVVAFPIDPRMLQRTQDNSCSFALHAHGAAVTRFTTPGFPNSPYPAHARCQWVLRGDADSVLSLTFRSFDVAPCDEHGSDLVTVYDSLSPMEPHAVVRLCGTFSPSYNLTFLSSQNVFLVTLITNTDRRHPGFEATFFQLPKMSSCGGFLSDTQGTFSSPYYPGHYPPNINCTWNIKVPNNRNVKVRFKLFYLVDPNVPVGSCTKDYVEINGEKYCGERSQFVVSSNSSKITVHFHSDHSYTDTGFLAEYLSYDSNDPCPGMFMCKTGRCIRKELRCDGWADCPDYSDERYCRCNATHQFTCKNQFCKPLFWVCDSVNDCGDGSDEEGCSCPAGSFKCSNGKCLPQSQKCNGKDNCGDGSDEASCDSVNVVSCTKYTYRCQNGLCLSKGNPECDGKTDCSDGSDEKNCDCGLRSFTKQARVVGGTNADEGEWPWQVSLHALGQGHLCGASLISPDWLVSAAHCFQDDKNFKYSDYTMWTAFLGLLDQSKRSASGVQELKLKRIITHPSFNDFTFDYDIALLELEKSVEYSTVVRPICLPDATHVFPAGKAIWVTGWGHTKEGGTGALILQKGEIRVINQTTCEDLMPQQITPRMMCVGFLSGGVDSCQGDSGGPLSSAEKDGRMFQAGVVSWGEGCAQRNKPGVYTRLPVVRDWIKEHTGV

SEQ ID NO: 450 - protein, 855 aa, Rattus norvegicus
MGNNRGRKAGGGSQDFGAGLKYNSRLENMNGFEEGVEFLPVNNAKQVEKRGPRRWVVMVAVVFSFLLLSLMAGLLVWHFHYRNVRIQKVFNGHLRITNENFLDAYENSTSTEFISLASQVKEALKLMYSEVPVLGPYHKKSTVTAFSEGSVIAYYWSEFSIPPHLEEEVDRAMAVERVVTLPPRARALKSFVLTSVVAFPIDPRMLQRTQDNSCSFALHARGRTVTRFTTPGFPNSPYPAHARCQWVLRGDADSVLSLTFRSFDVAPCDGHDSDLVTVYDSLSPMEPHAVVRLCGTFSPSYNLTFLSSQNVFLVTLITNTDRRHPGFEATFFQLPKMSSCGGLLSEAQGTFSSPYYPGHYPPNINCTWNIKVPNNRNVKVRFKLFYLVDPNIPVGSCTKDYVEINGEKFCGERSQFVVSSNSSKITVHFHSDHSYTDTGFLAEYLSYDSNDPCPGMFMCKTGRCIRKDLRCDGWADCPDYSDERHCRCNATHQFMCKNQFCKPLFWVCDSVNDCGDGSDEEGCSCPAGSFKCSNGKCLPQSQQCNGKDDCGDGSDEASCDNVNAVSCTKYTYRCQNGLCLNKGNPECDGKKDCSDGSDEKNCDCGLRSFTKQARVVGGTNADEGEWPWQVSLHALGQGHLCGASLISPDWLVSAAHCFQDETIFKYSDHTMWTAFLGLLDQSKRSASGVQEHKLKRIITHPSFNDFTFDYDIALLELEKPAEYSTVVRPICLPDNTHVFPAGKAIWVTGWGHTKEGGTGALILQKGEIRVINQTTCEELLPQQITPRMMCVGFLSGGVDSCQGDSGGPLSSVEKDGRIFQAGVVSWGEGCAQRNKPGVYTRIPEVRDWIKEQTGV

SEQ ID NO: 451 - DNA, 723 bp, Homo sapiens
gttgttgggggcacggatgcggatgagggcgagtggccctggcaggtaagcctgcatgctctgggccagggccacatctgcggtgcttccctcatctctcccaactggctggtctctgccgcacactgctacatcgatgacagaggattcaggtactcagaccccacgcagtggacggccttcctgggcttgcacgaccagagccagcgcagcgcccctggggtgcaggagcgcaggctcaagcgcatcatctcccaccccttcttcaatgacttcaccttcgactatgacatcgcgctgctggagctggagaaaccggcagagtacagctccatggtgcggcccatctgcctgccggacgcctcccatgtcttccctgccggcaaggccatctgggtcacgggctggggacacacccagtatggaggcactggcgcgctgatcctgcaaaagggtgagatccgcgtcatcaaccagaccacctgcgagaacctcctgccgcagcacatcacgccgcgcatgatgtgcgtgggcttcctcagcggcggcgtggactcctgccagggtgattccgggggacccctgtccagcgtggaggcggatgggcggatcttccaggccggtgtggtgagctggggagacggctgcgctcagaggaacaagccaggcgtgtacacaaggctccctctgtttcgggactggatcaaagagaacactggggta

SEQ ID NO: 452 - DNA, 723 bp, Homo sapiens
gttgttgggggcacggatgcggatgagggcgagtggccctggcaggtaagcctgcatgctctgggccagggccacatctgcggtgcttccctcatctctcccaactggctggtctctgccgcacactgctacatcgatgacagaggattcaggtactcagaccccacgcagtggacggccttcctgggcttgcacgaccagagccagcgcagcgcccctggggtgcaggagcgcaggctcaagcgcatcatctcccaccccttcttcaatgacttcaccttcgactatgacatcgcgctgctggagctggagaaaccggcagagtacagctccatggtgcggcccatctgcctgccggacgcctcccatgtcttccctgccggcaaggccatctgggtcacgggctggggacacacccagtatggaggcactggcgcgctgatcctgcaaaagggtgagatccgcgtcatcaaccagaccacctgcgagaacctcctgccgcagcagatcacgccgcgcatgatgtgcgtgggcttcctcagcggcggcgtggactcctgccagggtgattccgggggacccctgtccagcgtggaggcggatgggcggatcttccaggccggtgtggtgagctggggacaaggctgcgctcagaggaacaagccaggcgtgtacacaaggctccctctgtttcgggactggatcaaagagaacactggggta

SEQ ID NO: 453 - DNA, 723 bp, Homo sapiens
gttgttgggggcacggatgcggatgagggcgagtggccctggcaggtaagcctgcatgctctgggccagggccacatctgcggtgcttccctcatctctcccaactggctggtctctgccgcacactgctacatcgatgacagaggattcaggtactcagaccccacgcagtggacggccttcctgggcttgcacgaccagagccagcgcagcgcccctggggtgcaggagcgcaggctcaagcgcatcatctcccaccccttcttcaatgacttcaccttcgactatgacatcgcgctgctggagctggagaaaccggcagagtacagctccatggtgcggcccatctgcctgccggacgcctcccatgtcttccctgccggcaaggccatctgggtcacgggctggggacacacccagtatggaggcactggcgcgctgatcctgcaaaagggtgagatccgcgtcatcaaccagaccacctgcgagaacctcctgccgcagcagatcacgccgcgcatgatgtgcgtgggcttcctcagcggcggcgtggactcctgccagggtgattccgggggacccctgtccagcgtggaggcggatgggcggatcttccaggccggtgtggtgagctggggaaacggctgcgctcagaggaacaagccaggcgtgtacacaaggctccctctgtttcgggactggatcaaagagaacactggggta

SEQ ID NO: 454 - DNA, 723 bp, Homo sapiens
gttgttgggggcacggatgcggatgagggcgagtggccctggcaggtaagcctgcatgctctgggccagggccacatctgcggtgcttccctcatctctcccaactggctggtctctgccgcacactgctacatcgatgacagaggattcaggtactcagaccccacgcagtggacggccttcctgggcttgcacgaccagagccagcgcagcgcccctggggtgcaggagcgcaggctcaagcgcatcatctcccaccccttcttcaatgacttcaccttcgactatgacatcgcgctgctggagctggagaaaccggcagagtacagctccatggtgcggcccatctgcctgccggacgcctcccatgtcttccctgccggcaaggccatctgggtcacgggctggggacacacccagtatggaggcactggcgcgctgatcctgcaaaagggtgagatccgcgtcatcaaccagaccacctgcgagaacctcctgccgcagcagatcacgccgcgcatgatgtgcgtgggcttcctcagcggcggcgtggactcctgccagggtgattccgggggacccctgtccagcgtggaggcggatgggcggatcttccaggccggtgtggtgagctggggacacggctgcgctcagaggaacaagccaggcgtgtacacaaggctccctctgtttcgggactggatcaaagagaacactggggta

SEQ ID NO: 455 - DNA, 723 bp, Homo sapiens
gttgttgggggcacggatgcggatgagggcgagtggccctggcaggtaagcctgcatgctctgggccagggccacatctgcggtgcttccctcatctctcccaactggctggtctctgccgcacactgctacatcgatgacagaggattcaggtactcagaccccacgcagtggacggccttcctgggcttgcacgaccagagccagcgcagcgcccctggggtgcaggagcgcaggctcaagcgcatcatctcccaccccttcttcaatgccttcaccttcgactatgacatcgcgctgctggagctggagaaaccggcagagtacagctccatggtgcggcccatctgcctgccggacgcctcccatgtcttccctgccggcaaggccatctgggtcacgggctggggacacacccagtatggaggcactggcgcgctgatcctgcaaaagggtgagatccgcgtcatcaaccagaccacctgcgagaacctcctgccgcagcagatcacgccgcgcatgatgtgcgtgggcttcctcagcggcggcgtggactcctgccagggtgattccgggggacccctgtccagcgtggaggcggatgggcggatcttccaggccggtgtggtgagctggggagacggctgcgctcagaggaacaagccaggcgtgtacacaaggctccctctgtttcgggactggatcaaagagaacactggggta

SEQ ID NO: 456 - DNA, 723 bp, Homo sapiens
gttgttgggggcacggatgcggatgagggcgagtggccctggcaggtaagcctgcatgctctgggccagggccacatctgcggtgcttccctcatctctcccaactggctggtctctgccgcacactgctacatcgatgacagaggattcaggtactcagaccccacgcagtggacggccttcctgggcttgcacgaccagagccagcgcagcgcccctggggtgcaggagcgcaggctcaagcgcatcatctcccaccccttcttcaatgtcttcaccttcgactatgacatcgcgctgctggagctggagaaaccggcagagtacagctccatggtgcggcccatctgcctgccggacgcctcccatgtcttccctgccggcaaggccatctgggtcacgggctggggacacacccagtatggaggcactggcgcgctgatcctgcaaaagggtgagatccgcgtcatcaaccagaccacctgcgagaacctcctgccgcagcagatcacgccgcgcatgatgtgcgtgggcttcctcagcggcggcgtggactcctgccagggtgattccgggggacccctgtccagcgtggaggcggatgggcggatcttccaggccggtgtggtgagctggggagacggctgcgctcagaggaacaagccaggcgtgtacacaaggctccctctgtttcgggactggatcaaagagaacactggggta

SEQ ID NO: 457 - DNA, 723 bp, Homo sapiens
gttgttgggggcacggatgcggatgagggcgagtggccctggcaggtaagcctgcatgctctgggccagggccacatctgcggtgcttccctcatctctcccaactggctggtctctgccgcacactgctacatcgatgacagaggattcaggtactcagaccccacgcagtggacggccttcctgggcttgcacgaccagagccagcgcagcgcccctggggtgcaggagcgcaggctcaagcgcatcatctcccaccccttcttcaatttcttcaccttcgactatgacatcgcgctgctggagctggagaaaccggcagagtacagctccatggtgcggcccatctgcctgccggacgcctcccatgtcttccctgccggcaaggccatctgggtcacgggctggggacacacccagtatggaggcactggcgcgctgatcctgcaaaagggtgagatccgcgtcatcaaccagaccacctgcgagaacctcctgccgcagcagatcacgccgcgcatgatgtgcgtgggcttcctcagcggcggcgtggactcctgccagggtgattccgggggacccctgtccagcgtggaggcggatgggcggatcttccaggccggtgtggtgagctggggagacggctgcgctcagaggaacaagccaggcgtgtacacaaggctccctctgtttcgggactggatcaaagagaacactggggta

SEQ ID NO: 458 - DNA, 723 bp, Homo sapiens
gttgttgggggcacggatgcggatgagggcgagtggccctggcaggtaagcctgcatgctctgggccagggccacatctgcggtgcttccctcatctctcccaactggctggtctctgccgcacactgctacatcgatgacagaggattcaggtactcagaccccacgcagtggacggccttcctgggcttgcacgaccagagccagcgcagcgcccctggggtgcaggagcgcaggctcaagcgcatcatctcccaccccttcttcaattccttcaccttcgactatgacatcgcgctgctggagctggagaaaccggcagagtacagctccatggtgcggcccatctgcctgccggacgcctcccatgtcttccctgccggcaaggccatctgggtcacgggctggggacacacccagtatggaggcactggcgcgctgatcctgcaaaagggtgagatccgcgtcatcaaccagaccacctgcgagaacctcctgccgcagcagatcacgccgcgcatgatgtgcgtgggcttcctcagcggcggcgtggactcctgccagggtgattccgggggacccctgtccagcgtggaggcggatgggcggatcttccaggccggtgtggtgagctggggagacggctgcgctcagaggaacaagccaggcgtgtacacaaggctccctctgtttcgggactggatcaaagagaacactggggta

SEQ ID NO: 459 - DNA, 723 bp, Homo sapiens
gttgttgggggcacggatgcggatgagggcgagtggccctggcaggtaagcctgcatgctctgggccagggccacatctgcggtgcttccctcatctctcccaactggctggtctctgccgcacactgctacatcgatgacagaggattcaggtactcagaccccacgcagtggacggccttcctgggcttgcacgaccagagccagcgcagcgcccctggggtgcaggagcgcaggctcaagcgcatcatctcccaccccttcttcaataccttcaccttcgactatgacatcgcgctgctggagctggagaaaccggcagagtacagctccatggtgcggcccatctgcctgccggacgcctcccatgtcttccctgccggcaaggccatctgggtcacgggctggggacacacccagtatggaggcactggcgcgctgatcctgcaaaagggtgagatccgcgtcatcaaccagaccacctgcgagaacctcctgccgcagcagatcacgccgcgcatgatgtgcgtgggcttcctcagcggcggcgtggactcctgccagggtgattccgggggacccctgtccagcgtggaggcggatgggcggatcttccaggccggtgtggtgagctggggagacggctgcgctcagaggaacaagccaggcgtgtacacaaggctccctctgtttcgggactggatcaaagagaacactggggta

SEQ ID NO: 460 - DNA, 723 bp, Homo sapiens
gttgttgggggcacggatgcggatgagggcgagtggccctggcaggtaagcctgcatgctctgggccagggccacatctgcggtgcttccctcatctctcccaactggctggtctctgccgcacactgctacatcgatgacagaggattcaggtactcagaccccacgcagtggacggccttcctgggcttgcacgaccagagccagcgcagcgcccctggggtgcaggagcgcaggctcaagcgcatcatctcccaccccttcttcaatgacttcaccttcgactatgacatcgcgctgctggagctggagaaaccggcagagtacagctccatggtgcggcccatctgcctgccggacgcctcccatgtcttccctgccggcaaggccatctgggtcacgggctggggacacacccagtatggaggcactggcgcgctgatcctgcaaaagggtgagatccgcgtcatcaaccagaccacctgcgagaacctcctgccgcagcagatcacgccgcgcatgatgtgcgtgggcttcctcagcggcggcgtggactcctgcctgggtgattccgggggacccctgtccagcgtggaggcggatgggcggatcttccaggccggtgtggtgagctggggagacggctgcgctcagaggaacaagccaggcgtgtacacaaggctccctctgtttcgggactggatcaaagagaacactggggta

SEQ ID NO: 461 - DNA, 723 bp, Homo sapiens
gttgttgggggcacggatgcggatgagggcgagtggccctggcaggtaagcctgcatgctctgggccagggccacatctgcggtgcttccctcatctctcccaactggctggtctctgccgcacactgctacatcgatgacagaggattcaggtactcagaccccacgcagtggacggccttcctgggcttgcacgaccagagccagcgcagcgcccctggggtgcaggagcgcaggctcaagcgcatcatctcccaccccttcttcaatgacttcaccttcgactatgacatcgcgctgctggagctggagaaaccggcagagtacagctccatggtgcggcccatctgcctgccggacgcctcccatgtcttccctgccggcaaggccatctgggtcacgggctggggacacacccagtatggaggcactggcgcgctgatcctgcaaaagggtgagatccgcgtcatcaaccagaccacctgcgagaacctcctgccgcagcagatcacgccgcgcatgatgtgcgtgggcttcctcagcggcggcgtggactcctgcatcggtgattccgggggacccctgtccagcgtggaggcggatgggcggatcttccaggccggtgtggtgagctggggagacggctgcgctcagaggaacaagccaggcgtgtacacaaggctccctctgtttcgggactggatcaaagagaacactggggta

SEQ ID NO: 462 - DNA, 723 bp, Homo sapiens
gttgttgggggcacggatgcggatgagggcgagtggccctggcaggtaagcctgcatgctctgggccagggccacatctgcggtgcttccctcatctctcccaactggctggtctctgccgcacactgctacatcgatgacagaggattcaggtactcagaccccacgcagtggacggccttcctgggcttgcacgaccagagccagcgcagcgcccctggggtgcaggagcgcaggctcaagcgcatcatctcccaccccttcttcaatgacttcaccttcgactatgacatcgcgctgctggagctggagaaaccggcagagtacagctccatggtgcggcccatctgcctgccggacgcctcccatgtcttccctgccggcaaggccatctgggtcacgggctggggacacacccagtatggaggcactggcgcgctgatcctgcaaaagggtgagatccgcgtcatcaaccagaccacctgcgagaacctcctgccgcagcagatcacgccgcgcatgatgtgcgtgggcttcctcagcggcggcgtggactcctgcttcggtgattccgggggacccctgtccagcgtggaggcggatgggcggatcttccaggccggtgtggtgagctggggagacggctgcgctcagaggaacaagccaggcgtgtacacaaggctccctctgtttcgggactggatcaaagagaacactggggta

SEQ ID NO: 463 - DNA, 723 bp, Homo sapiens
gttgttgggggcacggatgcggatgagggcgagtggccctggcaggtaagcctgcatgctctgggccagggccacatctgcggtgcttccctcatctctcccaactggctggtctctgccgcacactgctacatcgatgacagaggattcaggtactcagaccccacgcagtggacggccttcctgggcttgcacgaccagagccagcgcagcgcccctggggtgcaggagcgcaggctcaagcgcatcatctcccaccccttcttcaatgacttcaccttcgactatgacatcgcgctgctggagctggagaaaccggcagagtacagctccatggtgcggcccatctgcctgccggacgcctcccatgtcttccctgccggcaaggccatctgggtcacgggctggggacacacccagtttggaggcactggcgcgctgatcctgcaaaagggtgagatccgcgtcatcaaccagaccacctgcgagaacctcctgccgcagcagatcacgccgcgcatgatgtgcgtgggcttcctcagcggcggcgtggactcctgccagggtgattccgggggacccctgtccagcgtggaggcggatgggcggatcttccaggccggtgtggtgagctggggagacggctgcgctcagaggaacaagccaggcgtgtacacaaggctccctctgtttcgggactggatcaaagagaacactggggta

SEQ ID NO: 464 - DNA, 723 bp, Homo sapiens
gttgttgggggcacggatgcggatgagggcgagtggccctggcaggtaagcctgcatgctctgggccagggccacatctgcggtgcttccctcatctctcccaactggctggtctctgccgcacactgctacatcgatgacagaggattcaggtactcagaccccacgcagtggacggccttcctgggcttgcacgaccagagccagcgcagcgcccctggggtgcaggagcgcaggctcaagcgcatcatctcccaccccttcttcaatgacttcaccgccgactatgacatcgcgctgctggagctggagaaaccggcagagtacagctccatggtgcggcccatctgcctgccggacgcctcccatgtcttccctgccggcaaggccatctgggtcacgggctggggacacacccagtatggaggcactggcgcgctgatcctgcaaaagggtgagatccgcgtcatcaaccagaccacctgcgagaacctcctgccgcagcagatcacgccgcgcatgatgtgcgtgggcttcctcagcggcggcgtggactcctgccagggtgattccgggggacccctgtccagcgtggaggcggatgggcggatcttccaggccggtgtggtgagctggggagacggctgcgctcagaggaacaagccaggcgtgtacacaaggctccctctgtttcgggactggatcaaagagaacactggggta

SEQ ID NO: 465 - DNA, 723 bp, Homo sapiens
gttgttgggggcacggatgcggatgagggcgagtggccctggcaggtaagcctgcatgctctgggccagggccacatctgcggtgcttccctcatctctcccaactggctggtctctgccgcacactgctacatcgatgacagaggattcaggtactcagaccccacgcagtggacggccttcctgggcttgcacgaccagagccagcgcagcgcccctggggtgcaggagcgcaggctcaagcgcatcatctcccaccccttcttcaatgacttcaccgtcgactatgacatcgcgctgctggagctggagaaaccggcagagtacagctccatggtgcggcccatctgcctgccggacgcctcccatgtcttccctgccggcaaggccatctgggtcacgggctggggacacacccagtatggaggcactggcgcgctgatcctgcaaaagggtgagatccgcgtcatcaaccagaccacctgcgagaacctcctgccgcagcagatcacgccgcgcatgatgtgcgtgggcttcctcagcggcggcgtggactcctgccagggtgattccgggggacccctgtccagcgtggaggcggatgggcggatcttccaggccggtgtggtgagctggggagacggctgcgctcagaggaacaagccaggcgtgtacacaaggctccctctgtttcgggactggatcaaagagaacactggggta

SEQ ID NO: 466 - DNA, 723 bp, Homo sapiens
gttgttgggggcacggatgcggatgagggcgagtggccctggcaggtaagcctgcatgctctgggccagggccacatctgcggtgcttccctcatctctcccaactggctggtctctgccgcacactgctacatcgatgacagaggattcaggtactcagaccccacgcagtggacggccttcctgggcttgcacgaccagagccagcgcagcgcccctggggtgcaggagcgcaggctcaagcgcatcatctcccaccccttcttcaatgacttcacctcagactatgacatcgcgctgctggagctggagaaaccggcagagtacagctccatggtgcggcccatctgcctgccggacgcctcccatgtcttccctgccggcaaggccatctgggtcacgggctggggacacacccagtatggaggcactggcgcgctgatcctgcaaaagggtgagatccgcgtcatcaaccagaccacctgcgagaacctcctgccgcagcagatcacgccgcgcatgatgtgcgtgggcttcctcagcggcggcgtggactcctgccagggtgattccgggggacccctgtccagcgtggaggcggatgggcggatcttccaggccggtgtggtgagctggggagacggctgcgctcagaggaacaagccaggcgtgtacacaaggctccctctgtttcgggactggatcaaagagaacactggggta

SEQ ID NO: 467 - DNA, 723 bp, Homo sapiens
gttgttgggggcacggatgcggatgagggcgagtggccctggcaggtaagcctgcatgctctgggccagggccacatctgcggtgcttccctcatctctcccaactggctggtctctgccgcacactgctacatcgatgacagaggattcaggtactcagaccccacgcagtggacggccttcctgggcttgcacgaccagagccagcgcagcgcccctggggtgcaggagcgcaggctcaagcgcatcatctcccaccccttcttcaatgacttcaccggcgactatgacatcgcgctgctggagctggagaaaccggcagagtacagctccatggtgcggcccatctgcctgccggacgcctcccatgtcttccctgccggcaaggccatctgggtcacgggctggggacacacccagtatggaggcactggcgcgctgatcctgcaaaagggtgagatccgcgtcatcaaccagaccacctgcgagaacctcctgccgcagcagatcacgccgcgcatgatgtgcgtgggcttcctcagcggcggcgtggactcctgccagggtgattccgggggacccctgtccagcgtggaggcggatgggcggatcttccaggccggtgtggtgagctggggagacggctgcgctcagaggaacaagccaggcgtgtacacaaggctccctctgtttcgggactggatcaaagagaacactggggta

SEQ ID NO: 468 - DNA, 723 bp, Homo sapiens
gttgttgggggcacggatgcggatgagggcgagtggccctggcaggtaagcctgcatgctctgggccagggccacatctgcggtgcttccctcatctctcccaactggctggtctctgccgcacactgctacatcgatgacagaggattcaggtactcagaccccacgcagtggacggccttcctgggcttgcacgaccagagccagcgcagcgcccctggggtgcaggagcgcaggctcaagcgcatcatctcccaccccttcttcaatgacttcaccttcgactatgacatcgcgctgctggagctggagaaaccggcagagtacagctccatggtgcggcccatctgcctgccggacgcctcccatgtcttccctgccggcaaggccatctgggtcacgggctggggacacacccagtatggaggcactggcgcgctgatcctgcaaaagggtgagatccgcgtcatcaaccagaccacctgcgagaacctcctgccgcagcagatcacgccgcgcatgatgtgcgtgggcttcctcagcggcggcgtggactcctgccagggtgattccgggggacccctgtccagcgtggaggcggatgggcggatcttccaggccggtgtggtgagcttcggagacggctgcgctcagaggaacaagccaggcgtgtacacaaggctccctctgtttcgggactggatcaaagagaacactggggta

SEQ ID NO: 469 - DNA, 723 bp, Homo sapiens
gttgttgggggcacggatgcggatgagggcgagtggccctggcaggtaagcctgcatgctctgggccagggccacatctgcggtgcttccctcatctctcccaactggctggtctctgccgcacactgctacatcgatgacagaggattcaggtactcagaccccacgcagtggacggccttcctgggcttgcacgaccagagccagcgcagcgcccctggggtgcaggagcgcaggctcaagcgcatcatctcccaccccttcttcaatgacttcaccttcgactatgacatcgcgctgctggagctggagaaaccggcagagtacagctccatggtgcggcccatctgcctgccggacgcctcccatgtcttccctgccggcaaggccatctgggtcacgggctggggacacacccagtatggaggcactggcgcgctgatcctgcaaaagggtgagatccgcgtcatcaaccagaccacctgcgagaacctcctgccgcagcagatcacgccgcgcatgatgtgcgtgggcttcctcagcggcggcgtggactcctgccagggtgattccgggggacccctgtccagcgtggaggcggatgggcggatcttccaggccggtgtggtgagctacggagacggctgcgctcagaggaacaagccaggcgtgtacacaaggctccctctgtttcgggactggatcaaagagaacactggggta

SEQ ID NO: 470 - DNA, 723 bp, Homo sapiens
gttgttgggggcacggatgcggatgagggcgagtggccctggcaggtaagcctgcatgctctgggccagggccacatctgcggtgcttccctcatctctcccaactggctggtctctgccgcacactgctacatcgatgacagaggattcaggtactcagaccccacgcagtggacggccttcctgggcttgcacgaccagagccagcgcagcgcccctggggtgcaggagcgcaggctcaagcgcatcatctcccaccccttcttcaatgacttcaccttcgactatgacatcgcgctgctggagctggagaaaccggcagagtacagctccatggtgcggcccatctgcctgccggacgcctcccatgtcttccctgccggcaaggccatctgggtcacgggctggggacacacccagtatggaggcactggcgcgctgatcctgcaaaagggtgagatccgcgtcatcaaccagaccacctgcgagaacctcctgccggcgcagatcacgccgcgcatgatgtgcgtgggcttcctcagcggcggcgtggactcctgccagggtgattccgggggacccctgtccagcgtggaggcggatgggcggatcttccaggccggtgtggtgagctggggagacggctgcgctcagaggaacaagccaggcgtgtacacaaggctccctctgtttcgggactggatcaaagagaacactggggta

SEQ ID NO: 471 - DNA, 723 bp, Homo sapiens
gttgttgggggcacggatgcggatgagggcgagtggccctggcaggtaagcctgcatgctctgggccagggccacatctgcggtgcttccctcatctctcccaactggctggtctctgccgcacactgctacatcgatgacagaggattcaggtactcagaccccacgcagtggacggccttcctgggcttgcacgaccagagccagcgcagcgcccctggggtgcaggagcgcaggctcaagcgcatcatctcccaccccttcttcaatgacttcaccttcgactatgacatcgcgctgctggagctggagaaaccggcagagtacagctccatggtgcggcccatctgcctgccggacgcctcccatgtcttccctgccggcaaggccatctgggtcacgggctggggacacacccagtatggaggcactggcgcgctgatcctgcaaaagggtgagatccgcgtcatcaaccagaccacctgcgagaacctcctgccggtgcagatcacgccgcgcatgatgtgcgtgggcttcctcagcggcggcgtggactcctgccagggtgattccgggggacccctgtccagcgtggaggcggatgggcggatcttccaggccggtgtggtgagctggggagacggctgcgctcagaggaacaagccaggcgtgtacacaaggctccctctgtttcgggactggatcaaagagaacactggggta

SEQ ID NO: 472 - DNA, 723 bp, Homo sapiens
gttgttgggggcacggatgcggatgagggcgagtggccctggcaggtaagcctgcatgctctgggccagggccacatctgcggtgcttccctcatctctcccaactggctggtctctgccgcacactgctacatcgatgacagaggattcaggtactcagaccccacgcagtggacggccttcctgggcttgcacgaccagagccagcgcagcgcccctggggtgcaggagcgcaggctcaagcgcatcatctcccaccccttcttcaatgacttcaccttcgactatgacatcgcgctgctggagctggagaaaccggcagagtacagctccatggtgcggcccatctgcctgccggacgcctcccatgtcttccctgccggcaaggccatctgggtcacgggctggggacacacccagtatggaggcactggcgcgctgatcctgcaaaagggtgagatccgcgtcatcaaccagaccacctgcgagaacctcctgccgttccagatcacgccgcgcatgatgtgcgtgggcttcctcagcggcggcgtggactcctgccagggtgattccgggggacccctgtccagcgtggaggcggatgggcggatcttccaggccggtgtggtgagctggggagacggctgcgctcagaggaacaagccaggcgtgtacacaaggctccctctgtttcgggactggatcaaagagaacactggggta

SEQ ID NO: 473 - DNA, 723 bp, Homo sapiens
gttgttgggggcacggatgcggatgagggcgagtggccctggcaggtaagcctgcatgctctgggccagggccacatctgcggtgcttccctcatctctcccaactggctggtctctgccgcacactgctacatcgatgacagaggattcaggtactcagaccccacgcagtggacggccttcctgggcttgcacgaccagagccagcgcagcgcccctggggtgcaggagcgcaggctcaagcgcatcatctcccaccccttcttcaatgacttcaccttcgactatgacatcgcgctgctggagctggagaaaccggcagagtacagctccatggtgcggcccatctgcctgccggacgcctcccatgtcttccctgccggcaaggccatctgggtcacgggctggggacacacccagtatggaggcactggcgcgctgatcctgcaaaagggtgagatccgcgtcatcaaccagaccacctgcgagaacctcctgccgcgacagatcacgccgcgcatgatgtgcgtgggcttcctcagcggcggcgtggactcctgccagggtgattccgggggacccctgtccagcgtggaggcggatgggcggatcttccaggccggtgtggtgagctggggagacggctgcgctcagaggaacaagccaggcgtgtacacaaggctccctctgtttcgggactggatcaaagagaacactggggta

SEQ ID NO: 474 - DNA, 723 bp, Homo sapiens
gttgttgggggcacggatgcggatgagggcgagtggccctggcaggtaagcctgcatgctctgggccagggccacatctgcggtgcttccctcatctctcccaactggctggtctctgccgcacactgctacatcgatgacagaggattcaggtactcagaccccacgcagtggacggccttcctgggcttgcacgaccagagccagcgcagcgcccctggggtgcaggagcgcaggctcaagcgcatcatctcccaccccttcttcaatgacttcaccttcgactatgacatcgcgctgctggagctggagaaaccggcagagtacagctccatggtgcggcccatctgcctgccggacgcctcccatgtcttccctgccggcaaggccatctgggtcacgggctggggacacacccagtatggaggcactggcgcgctgatcctgcaaaagggtgagatccgcgtcatcaaccagaccacctgcgagaacctcctgccgaagcagatcacgccgcgcatgatgtgcgtgggcttcctcagcggcggcgtggactcctgccagggtgattccgggggacccctgtccagcgtggaggcggatgggcggatcttccaggccggtgtggtgagctggggagacggctgcgctcagaggaacaagccaggcgtgtacacaaggctccctctgtttcgggactggatcaaagagaacactggggta

SEQ ID NO: 475 - DNA, 723 bp, Homo sapiens
gttgttgggggcacggatgcggatgagggcgagtggccctggcaggtaagcctgcatgctctgggccagggccacatctgcggtgcttccctcatctctcccaactggctggtctctgccgcacactgctacatcgatgacagaggattcaggtactcagaccccacgcagtggacggccttcctgggcttgcacgaccagagccagcgcagcgcccctggggtgcaggagcgcaggctcaagcgcatcatctcccaccccttcttcaatgacttcaccttcgactatgacatcgcgctgctggagctggagaaaccggcagagtacagctccatggtgcggcccatctgcctgccggacgcctcccatgtcttccctgccggcaaggccatctgggtcacgggctggggacacacccagtatggaggcactggcgcgctgatcctgcaaaagggtgagatccgcgtcatcaaccagaccacctgcgagaacctcctgccgcagcagatcacgccgcgcatgatgtgcgtgggcttcctcagcggcggcgtggactcctgccagggtgattccgggggacccctgtccagcgtggaggcggatgggcggatcttccaggccggtgtggtgagctggggagctggctgcgctcagaggaacaagccaggcgtgtacacaaggctccctctgtttcgggactggatcaaagagaacactggggta

SEQ ID NO: 476 - DNA, 723 bp, Homo sapiens
gttgttgggggcacggatgcggatgagggcgagtggccctggcaggtaagcctgcatgctctgggccagggccacatctgcggtgcttccctcatctctcccaactggctggtctctgccgcacactgctacatcgatgacagaggattcaggtactcagaccccacgcagtggacggccttcctgggcttgcacgaccagagccagcgcagcgcccctggggtgcaggagcgcaggctcaagcgcatcatctcccaccccttcttcaatgacttcaccttcgactatgacatcgcgctgctggagctggagaaaccggcagagtacagctccatggtgcggcccatctgcctgccggacgcctcccatgtcttccctgccggcaaggccatctgggtcacgggctggggacacacccagtatggaggcactggcgcgctgatcctgcaaaagggtgagatccgcgtcatcaaccagaccacctgcgagaacctcctgccgcagcagatcacgccgcgcatgatgtgcgtgggcttcctcagcggcggcgtggactcctgccagggtgattccgggggacccctgtccagcgtggaggcggatgggcggatcttccaggccggtgtggtgagctggggagtaggctgcgctcagaggaacaagccaggcgtgtacacaaggctccctctgtttcgggactggatcaaagagaacactggggta

SEQ ID NO: 477 - DNA, 723 bp, Homo sapiens
gttgttgggggcacggatgcggatgagggcgagtggccctggcaggtaagcctgcatgctctgggccagggccacatctgcggtgcttccctcatctctcccaactggctggtctctgccgcacactgctacatcgatgacagaggattcaggtactcagaccccacgcagtggacggccttcctgggcttgcacgaccagagccagcgcagcgcccctggggtgcaggagcgcaggctcaagcgcatcatctcccaccccttcttcaatgacttcaccttcgactatgacatcgcgctgctggagctggagaaaccggcagagtacagctccatggtgcggcccatctgcctgccggacgcctcccatgtcttccctgccggcaaggccatctgggtcacgggctggggacacacccagtatggaggcactggcgcgctgatcctgcaaaagggtgagatccgcgtcatcaaccagaccacctgcgagaacctcctgccgcagcagatcacgccgcgcatgatgtgcgtgggcttcctcagcggcggcgtggactcctgcgaaggtgattccgggggacccctgtccagcgtggaggcggatgggcggatcttccaggccggtgtggtgagctggggagacggctgcgctcagaggaacaagccaggcgtgtacacaaggctccctctgtttcgggactggatcaaagagaacactggggta

SEQ ID NO: 478 - DNA, 723 bp, Homo sapiens
gttgttgggggcacggatgcggatgagggcgagtggccctggcaggtaagcctgcatgctctgggccagggccacatctgcggtgcttccctcatctctcccaactggctggtctctgccgcacactgctacatcgatgacagaggattcaggtactcagaccccacgcagtggacggccttcctgggcttgcacgaccagagccagcgcagcgcccctggggtgcaggagcgcaggctcaagcgcatcatctcccaccccttcttcaatgacttcacctgggactatgacatcgcgctgctggagctggagaaaccggcagagtacagctccatggtgcggcccatctgcctgccggacgcctcccatgtcttccctgccggcaaggccatctgggtcacgggctggggacacacccagtatggaggcactggcgcgctgatcctgcaaaagggtgagatccgcgtcatcaaccagaccacctgcgagaacctcctgccgcagcagatcacgccgcgcatgatgtgcgtgggcttcctcagcggcggcgtggactcctgccagggtgattccgggggacccctgtccagcgtggaggcggatgggcggatcttccaggccggtgtggtgagctggggagacggctgcgctcagaggaacaagccaggcgtgtacacaaggctccctctgtttcgggactggatcaaagagaacactggggta

SEQ ID NO: 479 - DNA, 723 bp, Homo sapiens
gttgttgggggcacggatgcggatgagggcgagtggccctggcaggtaagcctgcatgctctgggccagggccacatctgcggtgcttccctcatctctcccaactggctggtctctgccgcacactgctacatcgatgacagaggattcaggtactcagaccccacgcagtggacggccttcctgggcttgcacgaccagagccagcgcagcgcccctggggtgcaggagcgcaggctcaagcgcatcatctcccaccccttcttcaatgacttcacctatgactatgacatcgcgctgctggagctggagaaaccggcagagtacagctccatggtgcggcccatctgcctgccggacgcctcccatgtcttccctgccggcaaggccatctgggtcacgggctggggacacacccagtatggaggcactggcgcgctgatcctgcaaaagggtgagatccgcgtcatcaaccagaccacctgcgagaacctcctgccgcagcagatcacgccgcgcatgatgtgcgtgggcttcctcagcggcggcgtggactcctgccagggtgattccgggggacccctgtccagcgtggaggcggatgggcggatcttccaggccggtgtggtgagctggggagacggctgcgctcagaggaacaagccaggcgtgtacacaaggctccctctgtttcgggactggatcaaagagaacactggggta

SEQ ID NO: 480 - DNA, 3149 bp, Homo sapiens
gacgcctgtgagacccgcgagcggcctcggggaccatggggagcgatcgggcccgcaagggcggagggggcccgaaggacttcggcgcgggactcaagtacaactcccggcacgagaaagtgaatggcttggaggaaggcgtggagttcctgccagtcaacaacgtcaagaaggtggaaaagcatggcccggggcgctgggtggtgctggcagccgtgctgatcggcctcctcttggtcttgctggggatcggcttcctggtgtggcatttgcagtaccgggacgtgcgtgtccagaaggtcttcaatggctacatgaggatcacaaatgagaattttgtggatgcctacgagaactccaactccactgagtttgtaagcctggccagcaaggtgaaggacgcgctgaagctgctgtacagcggagtcccattcctgggcccctaccacaaggagtcggctgtgacggccttcagcgagggcagcgtcatcgcctactactggtctgagttcagcatcccgcagcacctggtggaggaggccgagcgcgtcatggccgaggagcgcgtagtcatgctgcccccgcgggcgcgctccctgaagtcctttgtggtcacctcagtggtggctttccccacggactccaaaacagtacagaggacccaggacaacagctgcagctttggcctgcacgcccgcggtgtggagctgatgcgcttcaccacgcccggcttccctgacagcccctaccccgctcatgcccgctgccagtgggccctgcggggggacgccgactcagtgctgagcctcaccttccgcagctttgaccttgcgtcctgcgacgagcgcggcagcgacctggtgacggtgtacaacaccctgagccccatggagccccacgccctggtgcagttgtgtggcacctaccctccctcctacaacctgaccttccactcctcccagaacgtcctgctcatcacactgataaccaacactgagcggcggcatcccggctttgaggccaccttcttccagctgcctaggatgagcagctgtggaggccgcttacgtaaagcccaggggacattcaacagcccctactacccaggccactacccacccaacattgactgcacatggaacattgaggtgcccaacaaccagcatgtgaaggtgcgcttcaaattcttctacctgctggagcccggcgtgcctgcgggcacctgccccaaggactacgtggagatcaatggggagaaatactgcggagagaggtcccagttcgtcgtcaccagcaacagcaacaagatcacagttcgcttccactcagatcagtcctacaccgacaccggcttcttagctgaatacctctcctacgactccagtgacccatgcccggggcagttcacgtgccgcacggggcggtgtatccggaaggagctgcgctgtgatggctgggccgactgcaccgaccacagcgatgagctcaactgcagttgcgacgccggccaccagttcacgtgcaagaacaagttctgcaagcccctcttctgggtctgcgacagtgtgaacgactgcggagacaacagcgacgagcaggggtgcagttgtccggcccagaccttcaggtgttccaatgggaagtgcctctcgaaaagccagcagtgcaatgggaaggacgactgtggggacgggtccgacgaggcctcctgccccaaggtgaacgtcgtcacttgtaccaaacacacctaccgctgcctcaatgggctctgcttgagcaagggcaaccctgagtgtgacgggaaggaggactgtagcgacggctcagatgagaaggactgcgactgtgggctgcggtcattcacgagacaggctcgtgttgttgggggcacggatgcggatgagggcgagtggccctggcaggtaagcctgcatgctctgggccagggccacatctgcggtgcttccctcatctctcccaactggctggtctctgccgcacactgctacatcgatgacagaggattcaggtactcagaccccacgcagtggacggccttcctgggcttgcacgaccagagccagcgcagcgcccctggggtgcaggagcgcaggctcaagcgcatcatctcccaccccttcttcaatgacttcaccttcgactatgacatcgcgctgctggagctggagaaaccggcagagtacagctccatggtgcggcccatctgcctgccggacgcctcccatgtcttccctgccggcaaggccatctgggtcacgggctggggacacacccaggacggaggcactggcgcgctgatcctgcaaaagggtgagatccgcgtcatcaaccagaccacctgcgagaacctcctgccgcagcagatcacgccgcgcatgatgtgcgtgggcttcctcagcggcggcgtggactcctgccagggtgattccgggggacccctgtccagcgtggaggcggatgggcggatcttccaggccggtgtggtgagctggggagacggctgcgctcagaggaacttcccaggcgtgtacacaaggctccctctgtttcgggactggatcaaagagaacactggggtataggggccggggccacccaaatgtgtacacctgcggggccacccatcgtccaccccagtgtgcacgcctgcaggctggagactggaccgctgactgcaccagcgcccccagaacatacactgtgaactcaatctccagggctccaaatctgcctagaaaacctctcgcttcctcagcctccaaagtggagctgggaggtagaaggggaggacactggtggttctactgacccaactgggggcaaaggtttgaagacacagcctcccccgccagccccaagctgggccgaggcgcgtttgtgtatatctgcctcccctgtctgtaaggagcagcgggaacggagcttcggagcctcctcagtgaaggtggtggggctgccggatctgggctgtggggcccttgggccacgctcttgaggaagcccaggctcggaggaccctggaaaacagacgggtctgagactgaaaatggtttaccagctcccaggtgacttcagtgtgtgtattgtgtaaatgagtaaaacattttatttctttttaaaaaaaaaaa

SEQ ID NO: 481 - DNA, 3149 bp, Homo sapiens
gacgcctgtgagacccgcgagcggcctcggggaccatggggagcgatcgggcccgcaagggcggagggggcccgaaggacttcggcgcgggactcaagtacaactcccggcacgagaaagtgaatggcttggaggaaggcgtggagttcctgccagtcaacaacgtcaagaaggtggaaaagcatggcccggggcgctgggtggtgctggcagccgtgctgatcggcctcctcttggtcttgctggggatcggcttcctggtgtggcatttgcagtaccgggacgtgcgtgtccagaaggtcttcaatggctacatgaggatcacaaatgagaattttgtggatgcctacgagaactccaactccactgagtttgtaagcctggccagcaaggtgaaggacgcgctgaagctgctgtacagcggagtcccattcctgggcccctaccacaaggagtcggctgtgacggccttcagcgagggcagcgtcatcgcctactactggtctgagttcagcatcccgcagcacctggtggaggaggccgagcgcgtcatggccgaggagcgcgtagtcatgctgcccccgcgggcgcgctccctgaagtcctttgtggtcacctcagtggtggctttccccacggactccaaaacagtacagaggacccaggacaacagctgcagctttggcctgcacgcccgcggtgtggagctgatgcgcttcaccacgcccggcttccctgacagcccctaccccgctcatgcccgctgccagtgggccctgcggggggacgccgactcagtgctgagcctcaccttccgcagctttgaccttgcgtcctgcgacgagcgcggcagcgacctggtgacggtgtacaacaccctgagccccatggagccccacgccctggtgcagttgtgtggcacctaccctccctcctacaacctgaccttccactcctcccagaacgtcctgctcatcacactgataaccaacactgagcggcggcatcccggctttgaggccaccttcttccagctgcctaggatgagcagctgtggaggccgcttacgtaaagcccaggggacattcaacagcccctactacccaggccactacccacccaacattgactgcacatggaacattgaggtgcccaacaaccagcatgtgaaggtgcgcttcaaattcttctacctgctggagcccggcgtgcctgcgggcacctgccccaaggactacgtggagatcaatggggagaaatactgcggagagaggtcccagttcgtcgtcaccagcaacagcaacaagatcacagttcgcttccactcagatcagtcctacaccgacaccggcttcttagctgaatacctctcctacgactccagtgacccatgcccggggcagttcacgtgccgcacggggcggtgtatccggaaggagctgcgctgtgatggctgggccgactgcaccgaccacagcgatgagctcaactgcagttgcgacgccggccaccagttcacgtgcaagaacaagttctgcaagcccctcttctgggtctgcgacagtgtgaacgactgcggagacaacagcgacgagcaggggtgcagttgtccggcccagaccttcaggtgttccaatgggaagtgcctctcgaaaagccagcagtgcaatgggaaggacgactgtggggacgggtccgacgaggcctcctgccccaaggtgaacgtcgtcacttgtaccaaacacacctaccgctgcctcaatgggctctgcttgagcaagggcaaccctgagtgtgacgggaaggaggactgtagcgacggctcagatgagaaggactgcgactgtgggctgcggtcattcacgagacaggctcgtgttgttgggggcacggatgcggatgagggcgagtggccctggcaggtaagcctgcatgctctgggccagggccacatctgcggtgcttccctcatctctcccaactggctggtctctgccgcacactgctacatcgatgacagaggattcaggtactcagaccccacgcagtggacggccttcctgggcttgcacgaccagagccagcgcagcgcccctggggtgcaggagcgcaggctcaagcgcatcatctcccaccccttcttcaatgacttcaccttcgactatgacatcgcgctgctggagctggagaaaccggcagagtacagctccatggtgcggcccatctgcctgccggacgcctcccatgtcttccctgccggcaaggccatctgggtcacgggctggggacacacccagtatggaggcactggcgcgctgatcctgcaaaagggtgagatccgcgtcatcaaccagaccacctgcgagaacctcctgccgcagcagatcacgccgcgcatgatgtgcgtgggcttcctcagcggcggcgtggactcctgcgtcggtgattccgggggacccctgtccagcgtggaggcggatgggcggatcttccaggccggtgtggtgagctggggagacggctgcgctcagaggaacaagccaggcgtgtacacaaggctccctctgtttcgggactggatcaaagagaacactggggtataggggccggggccacccaaatgtgtacacctgcggggccacccatcgtccaccccagtgtgcacgcctgcaggctggagactggaccgctgactgcaccagcgcccccagaacatacactgtgaactcaatctccagggctccaaatctgcctagaaaacctctcgcttcctcagcctccaaagtggagctgggaggtagaaggggaggacactggtggttctactgacccaactgggggcaaaggtttgaagacacagcctcccccgccagccccaagctgggccgaggcgcgtttgtgtatatctgcctcccctgtctgtaaggagcagcgggaacggagcttcggagcctcctcagtgaaggtggtggggctgccggatctgggctgtggggcccttgggccacgctcttgaggaagcccaggctcggaggaccctggaaaacagacgggtctgagactgaaaatggtttaccagctcccaggtgacttcagtgtgtgtattgtgtaaatgagtaaaacattttatttctttttaaaaaaaaaaa

SEQ ID NO: 482 - DNA, 3149 bp, Homo sapiens
gacgcctgtgagacccgcgagcggcctcggggaccatggggagcgatcgggcccgcaagggcggagggggcccgaaggacttcggcgcgggactcaagtacaactcccggcacgagaaagtgaatggcttggaggaaggcgtggagttcctgccagtcaacaacgtcaagaaggtggaaaagcatggcccggggcgctgggtggtgctggcagccgtgctgatcggcctcctcttggtcttgctggggatcggcttcctggtgtggcatttgcagtaccgggacgtgcgtgtccagaaggtcttcaatggctacatgaggatcacaaatgagaattttgtggatgcctacgagaactccaactccactgagtttgtaagcctggccagcaaggtgaaggacgcgctgaagctgctgtacagcggagtcccattcctgggcccctaccacaaggagtcggctgtgacggccttcagcgagggcagcgtcatcgcctactactggtctgagttcagcatcccgcagcacctggtggaggaggccgagcgcgtcatggccgaggagcgcgtagtcatgctgcccccgcgggcgcgctccctgaagtcctttgtggtcacctcagtggtggctttccccacggactccaaaacagtacagaggacccaggacaacagctgcagctttggcctgcacgcccgcggtgtggagctgatgcgcttcaccacgcccggcttccctgacagcccctaccccgctcatgcccgctgccagtgggccctgcggggggacgccgactcagtgctgagcctcaccttccgcagctttgaccttgcgtcctgcgacgagcgcggcagcgacctggtgacggtgtacaacaccctgagccccatggagccccacgccctggtgcagttgtgtggcacctaccctccctcctacaacctgaccttccactcctcccagaacgtcctgctcatcacactgataaccaacactgagcggcggcatcccggctttgaggccaccttcttccagctgcctaggatgagcagctgtggaggccgcttacgtaaagcccaggggacattcaacagcccctactacccaggccactacccacccaacattgactgcacatggaacattgaggtgcccaacaaccagcatgtgaaggtgcgcttcaaattcttctacctgctggagcccggcgtgcctgcgggcacctgccccaaggactacgtggagatcaatggggagaaatactgcggagagaggtcccagttcgtcgtcaccagcaacagcaacaagatcacagttcgcttccactcagatcagtcctacaccgacaccggcttcttagctgaatacctctcctacgactccagtgacccatgcccggggcagttcacgtgccgcacggggcggtgtatccggaaggagctgcgctgtgatggctgggccgactgcaccgaccacagcgatgagctcaactgcagttgcgacgccggccaccagttcacgtgcaagaacaagttctgcaagcccctcttctgggtctgcgacagtgtgaacgactgcggagacaacagcgacgagcaggggtgcagttgtccggcccagaccttcaggtgttccaatgggaagtgcctctcgaaaagccagcagtgcaatgggaaggacgactgtggggacgggtccgacgaggcctcctgccccaaggtgaacgtcgtcacttgtaccaaacacacctaccgctgcctcaatgggctctgcttgagcaagggcaaccctgagtgtgacgggaaggaggactgtagcgacggctcagatgagaaggactgcgactgtgggctgcggtcattcacgagacaggctcgtgttgttgggggcacggatgcggatgagggcgagtggccctggcaggtaagcctgcatgctctgggccagggccacatctgcggtgcttccctcatctctcccaactggctggtctctgccgcacactgctacatcgatgacagaggattcaggtactcagaccccacgcagtggacggccttcctgggcttgcacgaccagagccagcgcagcgcccctggggtgcaggagcgcaggctcaagcgcatcatctcccaccccttcttcaatgacgacaccttcgactatgacatcgcgctgctggagctggagaaaccggcagagtacagctccatggtgcggcccatctgcctgccggacgcctcccatgtcttccctgccggcaaggccatctgggtcacgggctggggacacacccagtatggaggcactggcgcgctgatcctgcaaaagggtgagatccgcgtcatcaaccagaccacctgcgagaacctcctgccgcagcagatcacgccgcgcatgatgtgcgtgggcttcctcagcggcggcgtggactcctgccagggtgattccgggggacccctgtccagcgtggaggcggatgggcggatcttccaggccggtgtggtgagctggggagacggctgcgctcagaggaacaagccaggcgtgtacacaaggctccctctgtttcgggactggatcaaagagaacactggggtataggggccggggccacccaaatgtgtacacctgcggggccacccatcgtccaccccagtgtgcacgcctgcaggctggagactggaccgctgactgcaccagcgcccccagaacatacactgtgaactcaatctccagggctccaaatctgcctagaaaacctctcgcttcctcagcctccaaagtggagctgggaggtagaaggggaggacactggtggttctactgacccaactgggggcaaaggtttgaagacacagcctcccccgccagccccaagctgggccgaggcgcgtttgtgtatatctgcctcccctgtctgtaaggagcagcgggaacggagcttcggagcctcctcagtgaaggtggtggggctgccggatctgggctgtggggcccttgggccacgctcttgaggaagcccaggctcggaggaccctggaaaacagacgggtctgagactgaaaatggtttaccagctcccaggtgacttcagtgtgtgtattgtgtaaatgagtaaaacattttatttctttttaaaaaaaaaaa

SEQ ID NO: 483 - DNA, 3149 bp, Homo sapiens
gacgcctgtgagacccgcgagcggcctcggggaccatggggagcgatcgggcccgcaagggcggagggggcccgaaggacttcggcgcgggactcaagtacaactcccggcacgagaaagtgaatggcttggaggaaggcgtggagttcctgccagtcaacaacgtcaagaaggtggaaaagcatggcccggggcgctgggtggtgctggcagccgtgctgatcggcctcctcttggtcttgctggggatcggcttcctggtgtggcatttgcagtaccgggacgtgcgtgtccagaaggtcttcaatggctacatgaggatcacaaatgagaattttgtggatgcctacgagaactccaactccactgagtttgtaagcctggccagcaaggtgaaggacgcgctgaagctgctgtacagcggagtcccattcctgggcccctaccacaaggagtcggctgtgacggccttcagcgagggcagcgtcatcgcctactactggtctgagttcagcatcccgcagcacctggtggaggaggccgagcgcgtcatggccgaggagcgcgtagtcatgctgcccccgcgggcgcgctccctgaagtcctttgtggtcacctcagtggtggctttccccacggactccaaaacagtacagaggacccaggacaacagctgcagctttggcctgcacgcccgcggtgtggagctgatgcgcttcaccacgcccggcttccctgacagcccctaccccgctcatgcccgctgccagtgggccctgcggggggacgccgactcagtgctgagcctcaccttccgcagctttgaccttgcgtcctgcgacgagcgcggcagcgacctggtgacggtgtacaacaccctgagccccatggagccccacgccctggtgcagttgtgtggcacctaccctccctcctacaacctgaccttccactcctcccagaacgtcctgctcatcacactgataaccaacactgagcggcggcatcccggctttgaggccaccttcttccagctgcctaggatgagcagctgtggaggccgcttacgtaaagcccaggggacattcaacagcccctactacccaggccactacccacccaacattgactgcacatggaacattgaggtgcccaacaaccagcatgtgaaggtgcgcttcaaattcttctacctgctggagcccggcgtgcctgcgggcacctgccccaaggactacgtggagatcaatggggagaaatactgcggagagaggtcccagttcgtcgtcaccagcaacagcaacaagatcacagttcgcttccactcagatcagtcctacaccgacaccggcttcttagctgaatacctctcctacgactccagtgacccatgcccggggcagttcacgtgccgcacggggcggtgtatccggaaggagctgcgctgtgatggctgggccgactgcaccgaccacagcgatgagctcaactgcagttgcgacgccggccaccagttcacgtgcaagaacaagttctgcaagcccctcttctgggtctgcgacagtgtgaacgactgcggagacaacagcgacgagcaggggtgcagttgtccggcccagaccttcaggtgttccaatgggaagtgcctctcgaaaagccagcagtgcaatgggaaggacgactgtggggacgggtccgacgaggcctcctgccccaaggtgaacgtcgtcacttgtaccaaacacacctaccgctgcctcaatgggctctgcttgagcaagggcaaccctgagtgtgacgggaaggaggactgtagcgacggctcagatgagaaggactgcgactgtgggctgcggtcattcacgagacaggctcgtgttgttgggggcacggatgcggatgagggcgagtggccctggcaggtaagcctgcatgctctgggccagggccacatctgcggtgcttccctcatctctcccaactggctggtctctgccgcacactgctacatcgatgacagaggattcaggtactcagaccccacgcagtggacggccttcctgggcttgcacgaccagagccagcgcagcgcccctggggtgcaggagcgcaggctcaagcgcatcatctcccaccccttcttcaatgacgagaccttcgactatgacatcgcgctgctggagctggagaaaccggcagagtacagctccatggtgcggcccatctgcctgccggacgcctcccatgtcttccctgccggcaaggccatctgggtcacgggctggggacacacccagtatggaggcactggcgcgctgatcctgcaaaagggtgagatccgcgtcatcaaccagaccacctgcgagaacctcctgccgcagcagatcacgccgcgcatgatgtgcgtgggcttcctcagcggcggcgtggactcctgccagggtgattccgggggacccctgtccagcgtggaggcggatgggcggatcttccaggccggtgtggtgagctggggagacggctgcgctcagaggaacaagccaggcgtgtacacaaggctccctctgtttcgggactggatcaaagagaacactggggtataggggccggggccacccaaatgtgtacacctgcggggccacccatcgtccaccccagtgtgcacgcctgcaggctggagactggaccgctgactgcaccagcgcccccagaacatacactgtgaactcaatctccagggctccaaatctgcctagaaaacctctcgcttcctcagcctccaaagtggagctgggaggtagaaggggaggacactggtggttctactgacccaactgggggcaaaggtttgaagacacagcctcccccgccagccccaagctgggccgaggcgcgtttgtgtatatctgcctcccctgtctgtaaggagcagcgggaacggagcttcggagcctcctcagtgaaggtggtggggctgccggatctgggctgtggggcccttgggccacgctcttgaggaagcccaggctcggaggaccctggaaaacagacgggtctgagactgaaaatggtttaccagctcccaggtgacttcagtgtgtgtattgtgtaaatgagtaaaacattttatttctttttaaaaaaaaaaa

SEQ ID NO: 484 - DNA, 3149 bp, Homo sapiens
gacgcctgtgagacccgcgagcggcctcggggaccatggggagcgatcgggcccgcaagggcggagggggcccgaaggacttcggcgcgggactcaagtacaactcccggcacgagaaagtgaatggcttggaggaaggcgtggagttcctgccagtcaacaacgtcaagaaggtggaaaagcatggcccggggcgctgggtggtgctggcagccgtgctgatcggcctcctcttggtcttgctggggatcggcttcctggtgtggcatttgcagtaccgggacgtgcgtgtccagaaggtcttcaatggctacatgaggatcacaaatgagaattttgtggatgcctacgagaactccaactccactgagtttgtaagcctggccagcaaggtgaaggacgcgctgaagctgctgtacagcggagtcccattcctgggcccctaccacaaggagtcggctgtgacggccttcagcgagggcagcgtcatcgcctactactggtctgagttcagcatcccgcagcacctggtggaggaggccgagcgcgtcatggccgaggagcgcgtagtcatgctgcccccgcgggcgcgctccctgaagtcctttgtggtcacctcagtggtggctttccccacggactccaaaacagtacagaggacccaggacaacagctgcagctttggcctgcacgcccgcggtgtggagctgatgcgcttcaccacgcccggcttccctgacagcccctaccccgctcatgcccgctgccagtgggccctgcggggggacgccgactcagtgctgagcctcaccttccgcagctttgaccttgcgtcctgcgacgagcgcggcagcgacctggtgacggtgtacaacaccctgagccccatggagccccacgccctggtgcagttgtgtggcacctaccctccctcctacaacctgaccttccactcctcccagaacgtcctgctcatcacactgataaccaacactgagcggcggcatcccggctttgaggccaccttcttccagctgcctaggatgagcagctgtggaggccgcttacgtaaagcccaggggacattcaacagcccctactacccaggccactacccacccaacattgactgcacatggaacattgaggtgcccaacaaccagcatgtgaaggtgcgcttcaaattcttctacctgctggagcccggcgtgcctgcgggcacctgccccaaggactacgtggagatcaatggggagaaatactgcggagagaggtcccagttcgtcgtcaccagcaacagcaacaagatcacagttcgcttccactcagatcagtcctacaccgacaccggcttcttagctgaatacctctcctacgactccagtgacccatgcccggggcagttcacgtgccgcacggggcggtgtatccggaaggagctgcgctgtgatggctgggccgactgcaccgaccacagcgatgagctcaactgcagttgcgacgccggccaccagttcacgtgcaagaacaagttctgcaagcccctcttctgggtctgcgacagtgtgaacgactgcggagacaacagcgacgagcaggggtgcagttgtccggcccagaccttcaggtgttccaatgggaagtgcctctcgaaaagccagcagtgcaatgggaaggacgactgtggggacgggtccgacgaggcctcctgccccaaggtgaacgtcgtcacttgtaccaaacacacctaccgctgcctcaatgggctctgcttgagcaagggcaaccctgagtgtgacgggaaggaggactgtagcgacggctcagatgagaaggactgcgactgtgggctgcggtcattcacgagacaggctcgtgttgttgggggcacggatgcggatgagggcgagtggccctggcaggtaagcctgcatgctctgggccagggccacatctgcggtgcttccctcatctctcccaactggctggtctctgccgcacactgctacatcgatgacagaggattcaggtactcagaccccacgcagtggacggccttcctgggcttgcacgaccagagccagcgcagcgcccctggggtgcaggagcgcaggctcaagcgcatcatctcccaccccttcttcaatgacgccaccttcgactatgacatcgcgctgctggagctggagaaaccggcagagtacagctccatggtgcggcccatctgcctgccggacgcctcccatgtcttccctgccggcaaggccatctgggtcacgggctggggacacacccagtatggaggcactggcgcgctgatcctgcaaaagggtgagatccgcgtcatcaaccagaccacctgcgagaacctcctgccgcagcagatcacgccgcgcatgatgtgcgtgggcttcctcagcggcggcgtggactcctgccagggtgattccgggggacccctgtccagcgtggaggcggatgggcggatcttccaggccggtgtggtgagctggggagacggctgcgctcagaggaacaagccaggcgtgtacacaaggctccctctgtttcgggactggatcaaagagaacactggggtataggggccggggccacccaaatgtgtacacctgcggggccacccatcgtccaccccagtgtgcacgcctgcaggctggagactggaccgctgactgcaccagcgcccccagaacatacactgtgaactcaatctccagggctccaaatctgcctagaaaacctctcgcttcctcagcctccaaagtggagctgggaggtagaaggggaggacactggtggttctactgacccaactgggggcaaaggtttgaagacacagcctcccccgccagccccaagctgggccgaggcgcgtttgtgtatatctgcctcccctgtctgtaaggagcagcgggaacggagcttcggagcctcctcagtgaaggtggtggggctgccggatctgggctgtggggcccttgggccacgctcttgaggaagcccaggctcggaggaccctggaaaacagacgggtctgagactgaaaatggtttaccagctcccaggtgacttcagtgtgtgtattgtgtaaatgagtaaaacattttatttctttttaaaaaaaaaaa

SEQ ID NO: 485 - DNA, 3149 bp, Homo sapiens
gacgcctgtgagacccgcgagcggcctcggggaccatggggagcgatcgggcccgcaagggcggagggggcccgaaggacttcggcgcgggactcaagtacaactcccggcacgagaaagtgaatggcttggaggaaggcgtggagttcctgccagtcaacaacgtcaagaaggtggaaaagcatggcccggggcgctgggtggtgctggcagccgtgctgatcggcctcctcttggtcttgctggggatcggcttcctggtgtggcatttgcagtaccgggacgtgcgtgtccagaaggtcttcaatggctacatgaggatcacaaatgagaattttgtggatgcctacgagaactccaactccactgagtttgtaagcctggccagcaaggtgaaggacgcgctgaagctgctgtacagcggagtcccattcctgggcccctaccacaaggagtcggctgtgacggccttcagcgagggcagcgtcatcgcctactactggtctgagttcagcatcccgcagcacctggtggaggaggccgagcgcgtcatggccgaggagcgcgtagtcatgctgcccccgcgggcgcgctccctgaagtcctttgtggtcacctcagtggtggctttccccacggactccaaaacagtacagaggacccaggacaacagctgcagctttggcctgcacgcccgcggtgtggagctgatgcgcttcaccacgcccggcttccctgacagcccctaccccgctcatgcccgctgccagtgggccctgcggggggacgccgactcagtgctgagcctcaccttccgcagctttgaccttgcgtcctgcgacgagcgcggcagcgacctggtgacggtgtacaacaccctgagccccatggagccccacgccctggtgcagttgtgtggcacctaccctccctcctacaacctgaccttccactcctcccagaacgtcctgctcatcacactgataaccaacactgagcggcggcatcccggctttgaggccaccttcttccagctgcctaggatgagcagctgtggaggccgcttacgtaaagcccaggggacattcaacagcccctactacccaggccactacccacccaacattgactgcacatggaacattgaggtgcccaacaaccagcatgtgaaggtgcgcttcaaattcttctacctgctggagcccggcgtgcctgcgggcacctgccccaaggactacgtggagatcaatggggagaaatactgcggagagaggtcccagttcgtcgtcaccagcaacagcaacaagatcacagttcgcttccactcagatcagtcctacaccgacaccggcttcttagctgaatacctctcctacgactccagtgacccatgcccggggcagttcacgtgccgcacggggcggtgtatccggaaggagctgcgctgtgatggctgggccgactgcaccgaccacagcgatgagctcaactgcagttgcgacgccggccaccagttcacgtgcaagaacaagttctgcaagcccctcttctgggtctgcgacagtgtgaacgactgcggagacaacagcgacgagcaggggtgcagttgtccggcccagaccttcaggtgttccaatgggaagtgcctctcgaaaagccagcagtgcaatgggaaggacgactgtggggacgggtccgacgaggcctcctgccccaaggtgaacgtcgtcacttgtaccaaacacacctaccgctgcctcaatgggctctgcttgagcaagggcaaccctgagtgtgacgggaaggaggactgtagcgacggctcagatgagaaggactgcgactgtgggctgcggtcattcacgagacaggctcgtgttgttgggggcacggatgcggatgagggcgagtggccctggcaggtaagcctgcatgctctgggccagggccacatctgcggtgcttccctcatctctcccaactggctggtctctgccgcacactgctacatcgatgacagaggattcaggtactcagaccccacgcagtggacggccttcctgggcttgcacgaccagagccagcgcagcgcccctggggtgcaggagcgcaggctcaagcgcatcatctcccaccccttcttcaatgactggaccttcgactatgacatcgcgctgctggagctggagaaaccggcagagtacagctccatggtgcggcccatctgcctgccggacgcctcccatgtcttccctgccggcaaggccatctgggtcacgggctggggacacacccagtatggaggcactggcgcgctgatcctgcaaaagggtgagatccgcgtcatcaaccagaccacctgcgagaacctcctgccgcagcagatcacgccgcgcatgatgtgcgtgggcttcctcagcggcggcgtggactcctgccagggtgattccgggggacccctgtccagcgtggaggcggatgggcggatcttccaggccggtgtggtgagctggggagacggctgcgctcagaggaacaagccaggcgtgtacacaaggctccctctgtttcgggactggatcaaagagaacactggggtataggggccggggccacccaaatgtgtacacctgcggggccacccatcgtccaccccagtgtgcacgcctgcaggctggagactggaccgctgactgcaccagcgcccccagaacatacactgtgaactcaatctccagggctccaaatctgcctagaaaacctctcgcttcctcagcctccaaagtggagctgggaggtagaaggggaggacactggtggttctactgacccaactgggggcaaaggtttgaagacacagcctcccccgccagccccaagctgggccgaggcgcgtttgtgtatatctgcctcccctgtctgtaaggagcagcgggaacggagcttcggagcctcctcagtgaaggtggtggggctgccggatctgggctgtggggcccttgggccacgctcttgaggaagcccaggctcggaggaccctggaaaacagacgggtctgagactgaaaatggtttaccagctcccaggtgacttcagtgtgtgtattgtgtaaatgagtaaaacattttatttctttttaaaaaaaaaaa

SEQ ID NO: 486 - DNA, 3149 bp, Homo sapiens
gacgcctgtgagacccgcgagcggcctcggggaccatggggagcgatcgggcccgcaagggcggagggggcccgaaggacttcggcgcgggactcaagtacaactcccggcacgagaaagtgaatggcttggaggaaggcgtggagttcctgccagtcaacaacgtcaagaaggtggaaaagcatggcccggggcgctgggtggtgctggcagccgtgctgatcggcctcctcttggtcttgctggggatcggcttcctggtgtggcatttgcagtaccgggacgtgcgtgtccagaaggtcttcaatggctacatgaggatcacaaatgagaattttgtggatgcctacgagaactccaactccactgagtttgtaagcctggccagcaaggtgaaggacgcgctgaagctgctgtacagcggagtcccattcctgggcccctaccacaaggagtcggctgtgacggccttcagcgagggcagcgtcatcgcctactactggtctgagttcagcatcccgcagcacctggtggaggaggccgagcgcgtcatggccgaggagcgcgtagtcatgctgcccccgcgggcgcgctccctgaagtcctttgtggtcacctcagtggtggctttccccacggactccaaaacagtacagaggacccaggacaacagctgcagctttggcctgcacgcccgcggtgtggagctgatgcgcttcaccacgcccggcttccctgacagcccctaccccgctcatgcccgctgccagtgggccctgcggggggacgccgactcagtgctgagcctcaccttccgcagctttgaccttgcgtcctgcgacgagcgcggcagcgacctggtgacggtgtacaacaccctgagccccatggagccccacgccctggtgcagttgtgtggcacctaccctccctcctacaacctgaccttccactcctcccagaacgtcctgctcatcacactgataaccaacactgagcggcggcatcccggctttgaggccaccttcttccagctgcctaggatgagcagctgtggaggccgcttacgtaaagcccaggggacattcaacagcccctactacccaggccactacccacccaacattgactgcacatggaacattgaggtgcccaacaaccagcatgtgaaggtgcgcttcaaattcttctacctgctggagcccggcgtgcctgcgggcacctgccccaaggactacgtggagatcaatggggagaaatactgcggagagaggtcccagttcgtcgtcaccagcaacagcaacaagatcacagttcgcttccactcagatcagtcctacaccgacaccggcttcttagctgaatacctctcctacgactccagtgacccatgcccggggcagttcacgtgccgcacggggcggtgtatccggaaggagctgcgctgtgatggctgggccgactgcaccgaccacagcgatgagctcaactgcagttgcgacgccggccaccagttcacgtgcaagaacaagttctgcaagcccctcttctgggtctgcgacagtgtgaacgactgcggagacaacagcgacgagcaggggtgcagttgtccggcccagaccttcaggtgttccaatgggaagtgcctctcgaaaagccagcagtgcaatgggaaggacgactgtggggacgggtccgacgaggcctcctgccccaaggtgaacgtcgtcacttgtaccaaacacacctaccgctgcctcaatgggctctgcttgagcaagggcaaccctgagtgtgacgggaaggaggactgtagcgacggctcagatgagaaggactgcgactgtgggctgcggtcattcacgagacaggctcgtgttgttgggggcacggatgcggatgagggcgagtggccctggcaggtaagcctgcatgctctgggccagggccacatctgcggtgcttccctcatctctcccaactggctggtctctgccgcacactgctacatcgatgacagaggattcaggtactcagaccccacgcagtggacggccttcctgggcttgcacgaccagagccagcgcagcgcccctggggtgcaggagcgcaggctcaagcgcatcatctcccaccccttcttcaatgactggaccttcgactatgacatcgcgctgctggagctggagaaaccggcagagtacagctccatggtgcggcccatctgcctgccggacgcctcccatgtcttccctgccggcaaggccatctgggtcacgggctggggacacacccagaacggaggcactggcgcgctgatcctgcaaaagggtgagatccgcgtcatcaaccagaccacctgcgagaacctcctgccgcagcagatcacgccgcgcatgatgtgcgtgggcttcctcagcggcggcgtggactcctgccagggtgattccgggggacccctgtccagcgtggaggcggatgggcggatcttccaggccggtgtggtgagctggggagacggctgcgctcagaggaacaagccaggcgtgtacacaaggctccctctgtttcgggactggatcaaagagaacactggggtataggggccggggccacccaaatgtgtacacctgcggggccacccatcgtccaccccagtgtgcacgcctgcaggctggagactggaccgctgactgcaccagcgcccccagaacatacactgtgaactcaatctccagggctccaaatctgcctagaaaacctctcgcttcctcagcctccaaagtggagctgggaggtagaaggggaggacactggtggttctactgacccaactgggggcaaaggtttgaagacacagcctcccccgccagccccaagctgggccgaggcgcgtttgtgtatatctgcctcccctgtctgtaaggagcagcgggaacggagcttcggagcctcctcagtgaaggtggtggggctgccggatctgggctgtggggcccttgggccacgctcttgaggaagcccaggctcggaggaccctggaaaacagacgggtctgagactgaaaatggtttaccagctcccaggtgacttcagtgtgtgtattgtgtaaatgagtaaaacattttatttctttttaaaaaaaaaaa

SEQ ID NO: 487 - DNA, 3149 bp, Homo sapiens
gacgcctgtgagacccgcgagcggcctcggggaccatggggagcgatcgggcccgcaagggcggagggggcccgaaggacttcggcgcgggactcaagtacaactcccggcacgagaaagtgaatggcttggaggaaggcgtggagttcctgccagtcaacaacgtcaagaaggtggaaaagcatggcccggggcgctgggtggtgctggcagccgtgctgatcggcctcctcttggtcttgctggggatcggcttcctggtgtggcatttgcagtaccgggacgtgcgtgtccagaaggtcttcaatggctacatgaggatcacaaatgagaattttgtggatgcctacgagaactccaactccactgagtttgtaagcctggccagcaaggtgaaggacgcgctgaagctgctgtacagcggagtcccattcctgggcccctaccacaaggagtcggctgtgacggccttcagcgagggcagcgtcatcgcctactactggtctgagttcagcatcccgcagcacctggtggaggaggccgagcgcgtcatggccgaggagcgcgtagtcatgctgcccccgcgggcgcgctccctgaagtcctttgtggtcacctcagtggtggctttccccacggactccaaaacagtacagaggacccaggacaacagctgcagctttggcctgcacgcccgcggtgtggagctgatgcgcttcaccacgcccggcttccctgacagcccctaccccgctcatgcccgctgccagtgggccctgcggggggacgccgactcagtgctgagcctcaccttccgcagctttgaccttgcgtcctgcgacgagcgcggcagcgacctggtgacggtgtacaacaccctgagccccatggagccccacgccctggtgcagttgtgtggcacctaccctccctcctacaacctgaccttccactcctcccagaacgtcctgctcatcacactgataaccaacactgagcggcggcatcccggctttgaggccaccttcttccagctgcctaggatgagcagctgtggaggccgcttacgtaaagcccaggggacattcaacagcccctactacccaggccactacccacccaacattgactgcacatggaacattgaggtgcccaacaaccagcatgtgaaggtgcgcttcaaattcttctacctgctggagcccggcgtgcctgcgggcacctgccccaaggactacgtggagatcaatggggagaaatactgcggagagaggtcccagttcgtcgtcaccagcaacagcaacaagatcacagttcgcttccactcagatcagtcctacaccgacaccggcttcttagctgaatacctctcctacgactccagtgacccatgcccggggcagttcacgtgccgcacggggcggtgtatccggaaggagctgcgctgtgatggctgggccgactgcaccgaccacagcgatgagctcaactgcagttgcgacgccggccaccagttcacgtgcaagaacaagttctgcaagcccctcttctgggtctgcgacagtgtgaacgactgcggagacaacagcgacgagcaggggtgcagttgtccggcccagaccttcaggtgttccaatgggaagtgcctctcgaaaagccagcagtgcaatgggaaggacgactgtggggacgggtccgacgaggcctcctgccccaaggtgaacgtcgtcacttgtaccaaacacacctaccgctgcctcaatgggctctgcttgagcaagggcaaccctgagtgtgacgggaaggaggactgtagcgacggctcagatgagaaggactgcgactgtgggctgcggtcattcacgagacaggctcgtgttgttgggggcacggatgcggatgagggcgagtggccctggcaggtaagcctgcatgctctgggccagggccacatctgcggtgcttccctcatctctcccaactggctggtctctgccgcacactgctacatcgatgacagaggattcaggtactcagaccccacgcagtggacggccttcctgggcttgcacgaccagagccagcgcagcgcccctggggtgcaggagcgcaggctcaagcgcatcatctcccaccccttcttcaatgactggaccttcgactatgacatcgcgctgctggagctggagaaaccggcagagtacagctccatggtgcggcccatctgcctgccggacgcctcccatgtcttccctgccggcaaggccatctgggtcacgggctggggacacacccaggacggaggcactggcgcgctgatcctgcaaaagggtgagatccgcgtcatcaaccagaccacctgcgagaacctcctgccgcagcagatcacgccgcgcatgatgtgcgtgggcttcctcagcggcggcgtggactcctgccagggtgattccgggggacccctgtccagcgtggaggcggatgggcggatcttccaggccggtgtggtgagctggggagacggctgcgctcagaggaacaagccaggcgtgtacacaaggctccctctgtttcgggactggatcaaagagaacactggggtataggggccggggccacccaaatgtgtacacctgcggggccacccatcgtccaccccagtgtgcacgcctgcaggctggagactggaccgctgactgcaccagcgcccccagaacatacactgtgaactcaatctccagggctccaaatctgcctagaaaacctctcgcttcctcagcctccaaagtggagctgggaggtagaaggggaggacactggtggttctactgacccaactgggggcaaaggtttgaagacacagcctcccccgccagccccaagctgggccgaggcgcgtttgtgtatatctgcctcccctgtctgtaaggagcagcgggaacggagcttcggagcctcctcagtgaaggtggtggggctgccggatctgggctgtggggcccttgggccacgctcttgaggaagcccaggctcggaggaccctggaaaacagacgggtctgagactgaaaatggtttaccagctcccaggtgacttcagtgtgtgtattgtgtaaatgagtaaaacattttatttctttttaaaaaaaaaaa

SEQ ID NO: 488 - DNA, 3149 bp, Homo sapiens
gacgcctgtgagacccgcgagcggcctcggggaccatggggagcgatcgggcccgcaagggcggagggggcccgaaggacttcggcgcgggactcaagtacaactcccggcacgagaaagtgaatggcttggaggaaggcgtggagttcctgccagtcaacaacgtcaagaaggtggaaaagcatggcccggggcgctgggtggtgctggcagccgtgctgatcggcctcctcttggtcttgctggggatcggcttcctggtgtggcatttgcagtaccgggacgtgcgtgtccagaaggtcttcaatggctacatgaggatcacaaatgagaattttgtggatgcctacgagaactccaactccactgagtttgtaagcctggccagcaaggtgaaggacgcgctgaagctgctgtacagcggagtcccattcctgggcccctaccacaaggagtcggctgtgacggccttcagcgagggcagcgtcatcgcctactactggtctgagttcagcatcccgcagcacctggtggaggaggccgagcgcgtcatggccgaggagcgcgtagtcatgctgcccccgcgggcgcgctccctgaagtcctttgtggtcacctcagtggtggctttccccacggactccaaaacagtacagaggacccaggacaacagctgcagctttggcctgcacgcccgcggtgtggagctgatgcgcttcaccacgcccggcttccctgacagcccctaccccgctcatgcccgctgccagtgggccctgcggggggacgccgactcagtgctgagcctcaccttccgcagctttgaccttgcgtcctgcgacgagcgcggcagcgacctggtgacggtgtacaacaccctgagccccatggagccccacgccctggtgcagttgtgtggcacctaccctccctcctacaacctgaccttccactcctcccagaacgtcctgctcatcacactgataaccaacactgagcggcggcatcccggctttgaggccaccttcttccagctgcctaggatgagcagctgtggaggccgcttacgtaaagcccaggggacattcaacagcccctactacccaggccactacccacccaacattgactgcacatggaacattgaggtgcccaacaaccagcatgtgaaggtgcgcttcaaattcttctacctgctggagcccggcgtgcctgcgggcacctgccccaaggactacgtggagatcaatggggagaaatactgcggagagaggtcccagttcgtcgtcaccagcaacagcaacaagatcacagttcgcttccactcagatcagtcctacaccgacaccggcttcttagctgaatacctctcctacgactccagtgacccatgcccggggcagttcacgtgccgcacggggcggtgtatccggaaggagctgcgctgtgatggctgggccgactgcaccgaccacagcgatgagctcaactgcagttgcgacgccggccaccagttcacgtgcaagaacaagttctgcaagcccctcttctgggtctgcgacagtgtgaacgactgcggagacaacagcgacgagcaggggtgcagttgtccggcccagaccttcaggtgttccaatgggaagtgcctctcgaaaagccagcagtgcaatgggaaggacgactgtggggacgggtccgacgaggcctcctgccccaaggtgaacgtcgtcacttgtaccaaacacacctaccgctgcctcaatgggctctgcttgagcaagggcaaccctgagtgtgacgggaaggaggactgtagcgacggctcagatgagaaggactgcgactgtgggctgcggtcattcacgagacaggctcgtgttgttgggggcacggatgcggatgagggcgagtggccctggcaggtaagcctgcatgctctgggccagggccacatctgcggtgcttccctcatctctcccaactggctggtctctgccgcacactgctacatcgatgacagaggattcaggtactcagaccccacgcagtggacggccttcctgggcttgcacgaccagagccagcgcagcgcccctggggtgcaggagcgcaggctcaagcgcatcatctcccaccccttcttcaatgactggaccttcgactatgacatcgcgctgctggagctggagaaaccggcagagtacagctccatggtgcggcccatctgcctgccggacgcctcccatgtcttccctgccggcaaggccatctgggtcacgggctggggacacacccaggagggaggcactggcgcgctgatcctgcaaaagggtgagatccgcgtcatcaaccagaccacctgcgagaacctcctgccgcagcagatcacgccgcgcatgatgtgcgtgggcttcctcagcggcggcgtggactcctgccagggtgattccgggggacccctgtccagcgtggaggcggatgggcggatcttccaggccggtgtggtgagctggggagacggctgcgctcagaggaacaagccaggcgtgtacacaaggctccctctgtttcgggactggatcaaagagaacactggggtataggggccggggccacccaaatgtgtacacctgcggggccacccatcgtccaccccagtgtgcacgcctgcaggctggagactggaccgctgactgcaccagcgcccccagaacatacactgtgaactcaatctccagggctccaaatctgcctagaaaacctctcgcttcctcagcctccaaagtggagctgggaggtagaaggggaggacactggtggttctactgacccaactgggggcaaaggtttgaagacacagcctcccccgccagccccaagctgggccgaggcgcgtttgtgtatatctgcctcccctgtctgtaaggagcagcgggaacggagcttcggagcctcctcagtgaaggtggtggggctgccggatctgggctgtggggcccttgggccacgctcttgaggaagcccaggctcggaggaccctggaaaacagacgggtctgagactgaaaatggtttaccagctcccaggtgacttcagtgtgtgtattgtgtaaatgagtaaaacattttatttctttttaaaaaaaaaaa

SEQ ID NO: 489 - DNA, 3149 bp, Homo sapiens
gacgcctgtgagacccgcgagcggcctcggggaccatggggagcgatcgggcccgcaagggcggagggggcccgaaggacttcggcgcgggactcaagtacaactcccggcacgagaaagtgaatggcttggaggaaggcgtggagttcctgccagtcaacaacgtcaagaaggtggaaaagcatggcccggggcgctgggtggtgctggcagccgtgctgatcggcctcctcttggtcttgctggggatcggcttcctggtgtggcatttgcagtaccgggacgtgcgtgtccagaaggtcttcaatggctacatgaggatcacaaatgagaattttgtggatgcctacgagaactccaactccactgagtttgtaagcctggccagcaaggtgaaggacgcgctgaagctgctgtacagcggagtcccattcctgggcccctaccacaaggagtcggctgtgacggccttcagcgagggcagcgtcatcgcctactactggtctgagttcagcatcccgcagcacctggtggaggaggccgagcgcgtcatggccgaggagcgcgtagtcatgctgcccccgcgggcgcgctccctgaagtcctttgtggtcacctcagtggtggctttccccacggactccaaaacagtacagaggacccaggacaacagctgcagctttggcctgcacgcccgcggtgtggagctgatgcgcttcaccacgcccggcttccctgacagcccctaccccgctcatgcccgctgccagtgggccctgcggggggacgccgactcagtgctgagcctcaccttccgcagctttgaccttgcgtcctgcgacgagcgcggcagcgacctggtgacggtgtacaacaccctgagccccatggagccccacgccctggtgcagttgtgtggcacctaccctccctcctacaacctgaccttccactcctcccagaacgtcctgctcatcacactgataaccaacactgagcggcggcatcccggctttgaggccaccttcttccagctgcctaggatgagcagctgtggaggccgcttacgtaaagcccaggggacattcaacagcccctactacccaggccactacccacccaacattgactgcacatggaacattgaggtgcccaacaaccagcatgtgaaggtgcgcttcaaattcttctacctgctggagcccggcgtgcctgcgggcacctgccccaaggactacgtggagatcaatggggagaaatactgcggagagaggtcccagttcgtcgtcaccagcaacagcaacaagatcacagttcgcttccactcagatcagtcctacaccgacaccggcttcttagctgaatacctctcctacgactccagtgacccatgcccggggcagttcacgtgccgcacggggcggtgtatccggaaggagctgcgctgtgatggctgggccgactgcaccgaccacagcgatgagctcaactgcagttgcgacgccggccaccagttcacgtgcaagaacaagttctgcaagcccctcttctgggtctgcgacagtgtgaacgactgcggagacaacagcgacgagcaggggtgcagttgtccggcccagaccttcaggtgttccaatgggaagtgcctctcgaaaagccagcagtgcaatgggaaggacgactgtggggacgggtccgacgaggcctcctgccccaaggtgaacgtcgtcacttgtaccaaacacacctaccgctgcctcaatgggctctgcttgagcaagggcaaccctgagtgtgacgggaaggaggactgtagcgacggctcagatgagaaggactgcgactgtgggctgcggtcattcacgagacaggctcgtgttgttgggggcacggatgcggatgagggcgagtggccctggcaggtaagcctgcatgctctgggccagggccacatctgcggtgcttccctcatctctcccaactggctggtctctgccgcacactgctacatcgatgacagaggattcaggtactcagaccccacgcagtggacggccttcctgggcttgcacgaccagagccagcgcagcgcccctggggtgcaggagcgcaggctcaagcgcatcatctcccaccccttcttcaatgactggaccttcgactatgacatcgcgctgctggagctggagaaaccggcagagtacagctccatggtgcggcccatctgcctgccggacgcctcccatgtcttccctgccggcaaggccatctgggtcacgggctggggacacacccaggccggaggcactggcgcgctgatcctgcaaaagggtgagatccgcgtcatcaaccagaccacctgcgagaacctcctgccgcagcagatcacgccgcgcatgatgtgcgtgggcttcctcagcggcggcgtggactcctgccagggtgattccgggggacccctgtccagcgtggaggcggatgggcggatcttccaggccggtgtggtgagctggggagacggctgcgctcagaggaacaagccaggcgtgtacacaaggctccctctgtttcgggactggatcaaagagaacactggggtataggggccggggccacccaaatgtgtacacctgcggggccacccatcgtccaccccagtgtgcacgcctgcaggctggagactggaccgctgactgcaccagcgcccccagaacatacactgtgaactcaatctccagggctccaaatctgcctagaaaacctctcgcttcctcagcctccaaagtggagctgggaggtagaaggggaggacactggtggttctactgacccaactgggggcaaaggtttgaagacacagcctcccccgccagccccaagctgggccgaggcgcgtttgtgtatatctgcctcccctgtctgtaaggagcagcgggaacggagcttcggagcctcctcagtgaaggtggtggggctgccggatctgggctgtggggcccttgggccacgctcttgaggaagcccaggctcggaggaccctggaaaacagacgggtctgagactgaaaatggtttaccagctcccaggtgacttcagtgtgtgtattgtgtaaatgagtaaaacattttatttctttttaaaaaaaaaaa

SEQ ID NO: 490 - DNA, 3149 bp, Homo sapiens
gacgcctgtgagacccgcgagcggcctcggggaccatggggagcgatcgggcccgcaagggcggagggggcccgaaggacttcggcgcgggactcaagtacaactcccggcacgagaaagtgaatggcttggaggaaggcgtggagttcctgccagtcaacaacgtcaagaaggtggaaaagcatggcccggggcgctgggtggtgctggcagccgtgctgatcggcctcctcttggtcttgctggggatcggcttcctggtgtggcatttgcagtaccgggacgtgcgtgtccagaaggtcttcaatggctacatgaggatcacaaatgagaattttgtggatgcctacgagaactccaactccactgagtttgtaagcctggccagcaaggtgaaggacgcgctgaagctgctgtacagcggagtcccattcctgggcccctaccacaaggagtcggctgtgacggccttcagcgagggcagcgtcatcgcctactactggtctgagttcagcatcccgcagcacctggtggaggaggccgagcgcgtcatggccgaggagcgcgtagtcatgctgcccccgcgggcgcgctccctgaagtcctttgtggtcacctcagtggtggctttccccacggactccaaaacagtacagaggacccaggacaacagctgcagctttggcctgcacgcccgcggtgtggagctgatgcgcttcaccacgcccggcttccctgacagcccctaccccgctcatgcccgctgccagtgggccctgcggggggacgccgactcagtgctgagcctcaccttccgcagctttgaccttgcgtcctgcgacgagcgcggcagcgacctggtgacggtgtacaacaccctgagccccatggagccccacgccctggtgcagttgtgtggcacctaccctccctcctacaacctgaccttccactcctcccagaacgtcctgctcatcacactgataaccaacactgagcggcggcatcccggctttgaggccaccttcttccagctgcctaggatgagcagctgtggaggccgcttacgtaaagcccaggggacattcaacagcccctactacccaggccactacccacccaacattgactgcacatggaacattgaggtgcccaacaaccagcatgtgaaggtgcgcttcaaattcttctacctgctggagcccggcgtgcctgcgggcacctgccccaaggactacgtggagatcaatggggagaaatactgcggagagaggtcccagttcgtcgtcaccagcaacagcaacaagatcacagttcgcttccactcagatcagtcctacaccgacaccggcttcttagctgaatacctctcctacgactccagtgacccatgcccggggcagttcacgtgccgcacggggcggtgtatccggaaggagctgcgctgtgatggctgggccgactgcaccgaccacagcgatgagctcaactgcagttgcgacgccggccaccagttcacgtgcaagaacaagttctgcaagcccctcttctgggtctgcgacagtgtgaacgactgcggagacaacagcgacgagcaggggtgcagttgtccggcccagaccttcaggtgttccaatgggaagtgcctctcgaaaagccagcagtgcaatgggaaggacgactgtggggacgggtccgacgaggcctcctgccccaaggtgaacgtcgtcacttgtaccaaacacacctaccgctgcctcaatgggctctgcttgagcaagggcaaccctgagtgtgacgggaaggaggactgtagcgacggctcagatgagaaggactgcgactgtgggctgcggtcattcacgagacaggctcgtgttgttgggggcacggatgcggatgagggcgagtggccctggcaggtaagcctgcatgctctgggccagggccacatctgcggtgcttccctcatctctcccaactggctggtctctgccgcacactgctacatcgatgacagaggattcaggtactcagaccccacgcagtggacggccttcctgggcttgcacgaccagagccagcgcagcgcccctggggtgcaggagcgcaggctcaagcgcatcatctcccaccccttcttcaatgactggaccttcgactatgacatcgcgctgctggagctggagaaaccggcagagtacagctccatggtgcggcccatctgcctgccggacgcctcccatgtcttccctgccggcaaggccatctgggtcacgggctggggacacacccagtggggaggcactggcgcgctgatcctgcaaaagggtgagatccgcgtcatcaaccagaccacctgcgagaacctcctgccgcagcagatcacgccgcgcatgatgtgcgtgggcttcctcagcggcggcgtggactcctgccagggtgattccgggggacccctgtccagcgtggaggcggatgggcggatcttccaggccggtgtggtgagctggggagacggctgcgctcagaggaacaagccaggcgtgtacacaaggctccctctgtttcgggactggatcaaagagaacactggggtataggggccggggccacccaaatgtgtacacctgcggggccacccatcgtccaccccagtgtgcacgcctgcaggctggagactggaccgctgactgcaccagcgcccccagaacatacactgtgaactcaatctccagggctccaaatctgcctagaaaacctctcgcttcctcagcctccaaagtggagctgggaggtagaaggggaggacactggtggttctactgacccaactgggggcaaaggtttgaagacacagcctcccccgccagccccaagctgggccgaggcgcgtttgtgtatatctgcctcccctgtctgtaaggagcagcgggaacggagcttcggagcctcctcagtgaaggtggtggggctgccggatctgggctgtggggcccttgggccacgctcttgaggaagcccaggctcggaggaccctggaaaacagacgggtctgagactgaaaatggtttaccagctcccaggtgacttcagtgtgtgtattgtgtaaatgagtaaaacattttatttctttttaaaaaaaaaaa

SEQ ID NO: 491 - DNA, 3149 bp, Homo sapiens
gacgcctgtgagacccgcgagcggcctcggggaccatggggagcgatcgggcccgcaagggcggagggggcccgaaggacttcggcgcgggactcaagtacaactcccggcacgagaaagtgaatggcttggaggaaggcgtggagttcctgccagtcaacaacgtcaagaaggtggaaaagcatggcccggggcgctgggtggtgctggcagccgtgctgatcggcctcctcttggtcttgctggggatcggcttcctggtgtggcatttgcagtaccgggacgtgcgtgtccagaaggtcttcaatggctacatgaggatcacaaatgagaattttgtggatgcctacgagaactccaactccactgagtttgtaagcctggccagcaaggtgaaggacgcgctgaagctgctgtacagcggagtcccattcctgggcccctaccacaaggagtcggctgtgacggccttcagcgagggcagcgtcatcgcctactactggtctgagttcagcatcccgcagcacctggtggaggaggccgagcgcgtcatggccgaggagcgcgtagtcatgctgcccccgcgggcgcgctccctgaagtcctttgtggtcacctcagtggtggctttccccacggactccaaaacagtacagaggacccaggacaacagctgcagctttggcctgcacgcccgcggtgtggagctgatgcgcttcaccacgcccggcttccctgacagcccctaccccgctcatgcccgctgccagtgggccctgcggggggacgccgactcagtgctgagcctcaccttccgcagctttgaccttgcgtcctgcgacgagcgcggcagcgacctggtgacggtgtacaacaccctgagccccatggagccccacgccctggtgcagttgtgtggcacctaccctccctcctacaacctgaccttccactcctcccagaacgtcctgctcatcacactgataaccaacactgagcggcggcatcccggctttgaggccaccttcttccagctgcctaggatgagcagctgtggaggccgcttacgtaaagcccaggggacattcaacagcccctactacccaggccactacccacccaacattgactgcacatggaacattgaggtgcccaacaaccagcatgtgaaggtgcgcttcaaattcttctacctgctggagcccggcgtgcctgcgggcacctgccccaaggactacgtggagatcaatggggagaaatactgcggagagaggtcccagttcgtcgtcaccagcaacagcaacaagatcacagttcgcttccactcagatcagtcctacaccgacaccggcttcttagctgaatacctctcctacgactccagtgacccatgcccggggcagttcacgtgccgcacggggcggtgtatccggaaggagctgcgctgtgatggctgggccgactgcaccgaccacagcgatgagctcaactgcagttgcgacgccggccaccagttcacgtgcaagaacaagttctgcaagcccctcttctgggtctgcgacagtgtgaacgactgcggagacaacagcgacgagcaggggtgcagttgtccggcccagaccttcaggtgttccaatgggaagtgcctctcgaaaagccagcagtgcaatgggaaggacgactgtggggacgggtccgacgaggcctcctgccccaaggtgaacgtcgtcacttgtaccaaacacacctaccgctgcctcaatgggctctgcttgagcaagggcaaccctgagtgtgacgggaaggaggactgtagcgacggctcagatgagaaggactgcgactgtgggctgcggtcattcacgagacaggctcgtgttgttgggggcacggatgcggatgagggcgagtggccctggcaggtaagcctgcatgctctgggccagggccacatctgcggtgcttccctcatctctcccaactggctggtctctgccgcacactgctacatcgatgacagaggattcaggtactcagaccccacgcagtggacggccttcctgggcttgcacgaccagagccagcgcagcgcccctggggtgcaggagcgcaggctcaagcgcatcatctcccaccccttcttcaatgactggaccttcgactatgacatcgcgctgctggagctggagaaaccggcagagtacagctccatggtgcggcccatctgcctgccggacgcctcccatgtcttccctgccggcaaggccatctgggtcacgggctggggacacacccagaggggaggcactggcgcgctgatcctgcaaaagggtgagatccgcgtcatcaaccagaccacctgcgagaacctcctgccgcagcagatcacgccgcgcatgatgtgcgtgggcttcctcagcggcggcgtggactcctgccagggtgattccgggggacccctgtccagcgtggaggcggatgggcggatcttccaggccggtgtggtgagctggggagacggctgcgctcagaggaacaagccaggcgtgtacacaaggctccctctgtttcgggactggatcaaagagaacactggggtataggggccggggccacccaaatgtgtacacctgcggggccacccatcgtccaccccagtgtgcacgcctgcaggctggagactggaccgctgactgcaccagcgcccccagaacatacactgtgaactcaatctccagggctccaaatctgcctagaaaacctctcgcttcctcagcctccaaagtggagctgggaggtagaaggggaggacactggtggttctactgacccaactgggggcaaaggtttgaagacacagcctcccccgccagccccaagctgggccgaggcgcgtttgtgtatatctgcctcccctgtctgtaaggagcagcgggaacggagcttcggagcctcctcagtgaaggtggtggggctgccggatctgggctgtggggcccttgggccacgctcttgaggaagcccaggctcggaggaccctggaaaacagacgggtctgagactgaaaatggtttaccagctcccaggtgacttcagtgtgtgtattgtgtaaatgagtaaaacattttatttctttttaaaaaaaaaaa

SEQ ID NO: 492 - DNA, 3149 bp, Homo sapiens
gacgcctgtgagacccgcgagcggcctcggggaccatggggagcgatcgggcccgcaagggcggagggggcccgaaggacttcggcgcgggactcaagtacaactcccggcacgagaaagtgaatggcttggaggaaggcgtggagttcctgccagtcaacaacgtcaagaaggtggaaaagcatggcccggggcgctgggtggtgctggcagccgtgctgatcggcctcctcttggtcttgctggggatcggcttcctggtgtggcatttgcagtaccgggacgtgcgtgtccagaaggtcttcaatggctacatgaggatcacaaatgagaattttgtggatgcctacgagaactccaactccactgagtttgtaagcctggccagcaaggtgaaggacgcgctgaagctgctgtacagcggagtcccattcctgggcccctaccacaaggagtcggctgtgacggccttcagcgagggcagcgtcatcgcctactactggtctgagttcagcatcccgcagcacctggtggaggaggccgagcgcgtcatggccgaggagcgcgtagtcatgctgcccccgcgggcgcgctccctgaagtcctttgtggtcacctcagtggtggctttccccacggactccaaaacagtacagaggacccaggacaacagctgcagctttggcctgcacgcccgcggtgtggagctgatgcgcttcaccacgcccggcttccctgacagcccctaccccgctcatgcccgctgccagtgggccctgcggggggacgccgactcagtgctgagcctcaccttccgcagctttgaccttgcgtcctgcgacgagcgcggcagcgacctggtgacggtgtacaacaccctgagccccatggagccccacgccctggtgcagttgtgtggcacctaccctccctcctacaacctgaccttccactcctcccagaacgtcctgctcatcacactgataaccaacactgagcggcggcatcccggctttgaggccaccttcttccagctgcctaggatgagcagctgtggaggccgcttacgtaaagcccaggggacattcaacagcccctactacccaggccactacccacccaacattgactgcacatggaacattgaggtgcccaacaaccagcatgtgaaggtgcgcttcaaattcttctacctgctggagcccggcgtgcctgcgggcacctgccccaaggactacgtggagatcaatggggagaaatactgcggagagaggtcccagttcgtcgtcaccagcaacagcaacaagatcacagttcgcttccactcagatcagtcctacaccgacaccggcttcttagctgaatacctctcctacgactccagtgacccatgcccggggcagttcacgtgccgcacggggcggtgtatccggaaggagctgcgctgtgatggctgggccgactgcaccgaccacagcgatgagctcaactgcagttgcgacgccggccaccagttcacgtgcaagaacaagttctgcaagcccctcttctgggtctgcgacagtgtgaacgactgcggagacaacagcgacgagcaggggtgcagttgtccggcccagaccttcaggtgttccaatgggaagtgcctctcgaaaagccagcagtgcaatgggaaggacgactgtggggacgggtccgacgaggcctcctgccccaaggtgaacgtcgtcacttgtaccaaacacacctaccgctgcctcaatgggctctgcttgagcaagggcaaccctgagtgtgacgggaaggaggactgtagcgacggctcagatgagaaggactgcgactgtgggctgcggtcattcacgagacaggctcgtgttgttgggggcacggatgcggatgagggcgagtggccctggcaggtaagcctgcatgctctgggccagggccacatctgcggtgcttccctcatctctcccaactggctggtctctgccgcacactgctacatcgatgacagaggattcaggtactcagaccccacgcagtggacggccttcctgggcttgcacgaccagagccagcgcagcgcccctggggtgcaggagcgcaggctcaagcgcatcatctcccaccccttcttcaatgactggaccttcgactatgacatcgcgctgctggagctggagaaaccggcagagtacagctccatggtgcggcccatctgcctgccggacgcctcccatgtcttccctgccggcaaggccatctgggtcacgggctggggacacacccagaggggaggcactggcgcgctgatcctgcaaaagggtgagatccgcgtcatcaaccagaccacctgcgagaacctcctgccgcagcagatcacgccgcgcatgatgtgcgtgggcttcctcagcggcggcgtggactcctgccggggtgattccgggggacccctgtccagcgtggaggcggatgggcggatcttccaggccggtgtggtgagctggggagacggctgcgctcagaggaacaagccaggcgtgtacacaaggctccctctgtttcgggactggatcaaagagaacactggggtataggggccggggccacccaaatgtgtacacctgcggggccacccatcgtccaccccagtgtgcacgcctgcaggctggagactggaccgctgactgcaccagcgcccccagaacatacactgtgaactcaatctccagggctccaaatctgcctagaaaacctctcgcttcctcagcctccaaagtggagctgggaggtagaaggggaggacactggtggttctactgacccaactgggggcaaaggtttgaagacacagcctcccccgccagccccaagctgggccgaggcgcgtttgtgtatatctgcctcccctgtctgtaaggagcagcgggaacggagcttcggagcctcctcagtgaaggtggtggggctgccggatctgggctgtggggcccttgggccacgctcttgaggaagcccaggctcggaggaccctggaaaacagacgggtctgagactgaaaatggtttaccagctcccaggtgacttcagtgtgtgtattgtgtaaatgagtaaaacattttatttctttttaaaaaaaaaaa

SEQ ID NO: 493 - DNA, 3149 bp, Homo sapiens
gacgcctgtgagacccgcgagcggcctcggggaccatggggagcgatcgggcccgcaagggcggagggggcccgaaggacttcggcgcgggactcaagtacaactcccggcacgagaaagtgaatggcttggaggaaggcgtggagttcctgccagtcaacaacgtcaagaaggtggaaaagcatggcccggggcgctgggtggtgctggcagccgtgctgatcggcctcctcttggtcttgctggggatcggcttcctggtgtggcatttgcagtaccgggacgtgcgtgtccagaaggtcttcaatggctacatgaggatcacaaatgagaattttgtggatgcctacgagaactccaactccactgagtttgtaagcctggccagcaaggtgaaggacgcgctgaagctgctgtacagcggagtcccattcctgggcccctaccacaaggagtcggctgtgacggccttcagcgagggcagcgtcatcgcctactactggtctgagttcagcatcccgcagcacctggtggaggaggccgagcgcgtcatggccgaggagcgcgtagtcatgctgcccccgcgggcgcgctccctgaagtcctttgtggtcacctcagtggtggctttccccacggactccaaaacagtacagaggacccaggacaacagctgcagctttggcctgcacgcccgcggtgtggagctgatgcgcttcaccacgcccggcttccctgacagcccctaccccgctcatgcccgctgccagtgggccctgcggggggacgccgactcagtgctgagcctcaccttccgcagctttgaccttgcgtcctgcgacgagcgcggcagcgacctggtgacggtgtacaacaccctgagccccatggagccccacgccctggtgcagttgtgtggcacctaccctccctcctacaacctgaccttccactcctcccagaacgtcctgctcatcacactgataaccaacactgagcggcggcatcccggctttgaggccaccttcttccagctgcctaggatgagcagctgtggaggccgcttacgtaaagcccaggggacattcaacagcccctactacccaggccactacccacccaacattgactgcacatggaacattgaggtgcccaacaaccagcatgtgaaggtgcgcttcaaattcttctacctgctggagcccggcgtgcctgcgggcacctgccccaaggactacgtggagatcaatggggagaaatactgcggagagaggtcccagttcgtcgtcaccagcaacagcaacaagatcacagttcgcttccactcagatcagtcctacaccgacaccggcttcttagctgaatacctctcctacgactccagtgacccatgcccggggcagttcacgtgccgcacggggcggtgtatccggaaggagctgcgctgtgatggctgggccgactgcaccgaccacagcgatgagctcaactgcagttgcgacgccggccaccagttcacgtgcaagaacaagttctgcaagcccctcttctgggtctgcgacagtgtgaacgactgcggagacaacagcgacgagcaggggtgcagttgtccggcccagaccttcaggtgttccaatgggaagtgcctctcgaaaagccagcagtgcaatgggaaggacgactgtggggacgggtccgacgaggcctcctgccccaaggtgaacgtcgtcacttgtaccaaacacacctaccgctgcctcaatgggctctgcttgagcaagggcaaccctgagtgtgacgggaaggaggactgtagcgacggctcagatgagaaggactgcgactgtgggctgcggtcattcacgagacaggctcgtgttgttgggggcacggatgcggatgagggcgagtggccctggcaggtaagcctgcatgctctgggccagggccacatctgcggtgcttccctcatctctcccaactggctggtctctgccgcacactgctacatcgatgacagaggattcaggtactcagaccccacgcagtggacggccttcctgggcttgcacgaccagagccagcgcagcgcccctggggtgcaggagcgcaggctcaagcgcatcatctcccaccccttcttcaatgactggaccttcgactatgacatcgcgctgctggagctggagaaaccggcagagtacagctccatggtgcggcccatctgcctgccggacgcctcccatgtcttccctgccggcaaggccatctgggtcacgggctggggacacacccagaggggaggcactggcgcgctgatcctgcaaaagggtgagatccgcgtcatcaaccagaccacctgcgagaacctcctgccgcagcagatcacgccgcgcatgatgtgcgtgggcttcctcagcggcggcgtggactcctgccggggtgattccgggggacccctgtccagcgtggaggcggatgggcggatcttccaggccggtgtggtgagctggggagacggctgcgctcagaggaacgcgccaggcgtgtacacaaggctccctctgtttcgggactggatcaaagagaacactggggtataggggccggggccacccaaatgtgtacacctgcggggccacccatcgtccaccccagtgtgcacgcctgcaggctggagactggaccgctgactgcaccagcgcccccagaacatacactgtgaactcaatctccagggctccaaatctgcctagaaaacctctcgcttcctcagcctccaaagtggagctgggaggtagaaggggaggacactggtggttctactgacccaactgggggcaaaggtttgaagacacagcctcccccgccagccccaagctgggccgaggcgcgtttgtgtatatctgcctcccctgtctgtaaggagcagcgggaacggagcttcggagcctcctcagtgaaggtggtggggctgccggatctgggctgtggggcccttgggccacgctcttgaggaagcccaggctcggaggaccctggaaaacagacgggtctgagactgaaaatggtttaccagctcccaggtgacttcagtgtgtgtattgtgtaaatgagtaaaacattttatttctttttaaaaaaaaaaa

SEQ ID NO: 494 - DNA, 3149 bp, Homo sapiens
gacgcctgtgagacccgcgagcggcctcggggaccatggggagcgatcgggcccgcaagggcggagggggcccgaaggacttcggcgcgggactcaagtacaactcccggcacgagaaagtgaatggcttggaggaaggcgtggagttcctgccagtcaacaacgtcaagaaggtggaaaagcatggcccggggcgctgggtggtgctggcagccgtgctgatcggcctcctcttggtcttgctggggatcggcttcctggtgtggcatttgcagtaccgggacgtgcgtgtccagaaggtcttcaatggctacatgaggatcacaaatgagaattttgtggatgcctacgagaactccaactccactgagtttgtaagcctggccagcaaggtgaaggacgcgctgaagctgctgtacagcggagtcccattcctgggcccctaccacaaggagtcggctgtgacggccttcagcgagggcagcgtcatcgcctactactggtctgagttcagcatcccgcagcacctggtggaggaggccgagcgcgtcatggccgaggagcgcgtagtcatgctgcccccgcgggcgcgctccctgaagtcctttgtggtcacctcagtggtggctttccccacggactccaaaacagtacagaggacccaggacaacagctgcagctttggcctgcacgcccgcggtgtggagctgatgcgcttcaccacgcccggcttccctgacagcccctaccccgctcatgcccgctgccagtgggccctgcggggggacgccgactcagtgctgagcctcaccttccgcagctttgaccttgcgtcctgcgacgagcgcggcagcgacctggtgacggtgtacaacaccctgagccccatggagccccacgccctggtgcagttgtgtggcacctaccctccctcctacaacctgaccttccactcctcccagaacgtcctgctcatcacactgataaccaacactgagcggcggcatcccggctttgaggccaccttcttccagctgcctaggatgagcagctgtggaggccgcttacgtaaagcccaggggacattcaacagcccctactacccaggccactacccacccaacattgactgcacatggaacattgaggtgcccaacaaccagcatgtgaaggtgcgcttcaaattcttctacctgctggagcccggcgtgcctgcgggcacctgccccaaggactacgtggagatcaatggggagaaatactgcggagagaggtcccagttcgtcgtcaccagcaacagcaacaagatcacagttcgcttccactcagatcagtcctacaccgacaccggcttcttagctgaatacctctcctacgactccagtgacccatgcccggggcagttcacgtgccgcacggggcggtgtatccggaaggagctgcgctgtgatggctgggccgactgcaccgaccacagcgatgagctcaactgcagttgcgacgccggccaccagttcacgtgcaagaacaagttctgcaagcccctcttctgggtctgcgacagtgtgaacgactgcggagacaacagcgacgagcaggggtgcagttgtccggcccagaccttcaggtgttccaatgggaagtgcctctcgaaaagccagcagtgcaatgggaaggacgactgtggggacgggtccgacgaggcctcctgccccaaggtgaacgtcgtcacttgtaccaaacacacctaccgctgcctcaatgggctctgcttgagcaagggcaaccctgagtgtgacgggaaggaggactgtagcgacggctcagatgagaaggactgcgactgtgggctgcggtcattcacgagacaggctcgtgttgttgggggcacggatgcggatgagggcgagtggccctggcaggtaagcctgcatgctctgggccagggccacatctgcggtgcttccctcatctctcccaactggctggtctctgccgcacactgctacatcgatgacagaggattcaggtactcagaccccacgcagtggacggccttcctgggcttgcacgaccagagccagcgcagcgcccctggggtgcaggagcgcaggctcaagcgcatcatctcccaccccttcttcaatgactggaccttcgactatgacatcgcgctgctggagctggagaaaccggcagagtacagctccatggtgcggcccatctgcctgccggacgcctcccatgtcttccctgccggcaaggccatctgggtcacgggctggggacacacccagaggggaggcactggcgcgctgatcctgcaaaagggtgagatccgcgtcatcaaccagaccacctgcgagaacctcctgccgcagcagatcacgccgcgcatgatgtgcgtgggcttcctcagcggcggcgtggactcctgccggggtgattccgggggacccctgtccagcgtggaggcggatgggcggatcttccaggccggtgtggtgagctggggagacggctgcgctcagaggaacttcccaggcgtgtacacaaggctccctctgtttcgggactggatcaaagagaacactggggtataggggccggggccacccaaatgtgtacacctgcggggccacccatcgtccaccccagtgtgcacgcctgcaggctggagactggaccgctgactgcaccagcgcccccagaacatacactgtgaactcaatctccagggctccaaatctgcctagaaaacctctcgcttcctcagcctccaaagtggagctgggaggtagaaggggaggacactggtggttctactgacccaactgggggcaaaggtttgaagacacagcctcccccgccagccccaagctgggccgaggcgcgtttgtgtatatctgcctcccctgtctgtaaggagcagcgggaacggagcttcggagcctcctcagtgaaggtggtggggctgccggatctgggctgtggggcccttgggccacgctcttgaggaagcccaggctcggaggaccctggaaaacagacgggtctgagactgaaaatggtttaccagctcccaggtgacttcagtgtgtgtattgtgtaaatgagtaaaacattttatttctttttaaaaaaaaaaa

SEQ ID NO: 495 - DNA, 3149 bp, Homo sapiens
gacgcctgtgagacccgcgagcggcctcggggaccatggggagcgatcgggcccgcaagggcggagggggcccgaaggacttcggcgcgggactcaagtacaactcccggcacgagaaagtgaatggcttggaggaaggcgtggagttcctgccagtcaacaacgtcaagaaggtggaaaagcatggcccggggcgctgggtggtgctggcagccgtgctgatcggcctcctcttggtcttgctggggatcggcttcctggtgtggcatttgcagtaccgggacgtgcgtgtccagaaggtcttcaatggctacatgaggatcacaaatgagaattttgtggatgcctacgagaactccaactccactgagtttgtaagcctggccagcaaggtgaaggacgcgctgaagctgctgtacagcggagtcccattcctgggcccctaccacaaggagtcggctgtgacggccttcagcgagggcagcgtcatcgcctactactggtctgagttcagcatcccgcagcacctggtggaggaggccgagcgcgtcatggccgaggagcgcgtagtcatgctgcccccgcgggcgcgctccctgaagtcctttgtggtcacctcagtggtggctttccccacggactccaaaacagtacagaggacccaggacaacagctgcagctttggcctgcacgcccgcggtgtggagctgatgcgcttcaccacgcccggcttccctgacagcccctaccccgctcatgcccgctgccagtgggccctgcggggggacgccgactcagtgctgagcctcaccttccgcagctttgaccttgcgtcctgcgacgagcgcggcagcgacctggtgacggtgtacaacaccctgagccccatggagccccacgccctggtgcagttgtgtggcacctaccctccctcctacaacctgaccttccactcctcccagaacgtcctgctcatcacactgataaccaacactgagcggcggcatcccggctttgaggccaccttcttccagctgcctaggatgagcagctgtggaggccgcttacgtaaagcccaggggacattcaacagcccctactacccaggccactacccacccaacattgactgcacatggaacattgaggtgcccaacaaccagcatgtgaaggtgcgcttcaaattcttctacctgctggagcccggcgtgcctgcgggcacctgccccaaggactacgtggagatcaatggggagaaatactgcggagagaggtcccagttcgtcgtcaccagcaacagcaacaagatcacagttcgcttccactcagatcagtcctacaccgacaccggcttcttagctgaatacctctcctacgactccagtgacccatgcccggggcagttcacgtgccgcacggggcggtgtatccggaaggagctgcgctgtgatggctgggccgactgcaccgaccacagcgatgagctcaactgcagttgcgacgccggccaccagttcacgtgcaagaacaagttctgcaagcccctcttctgggtctgcgacagtgtgaacgactgcggagacaacagcgacgagcaggggtgcagttgtccggcccagaccttcaggtgttccaatgggaagtgcctctcgaaaagccagcagtgcaatgggaaggacgactgtggggacgggtccgacgaggcctcctgccccaaggtgaacgtcgtcacttgtaccaaacacacctaccgctgcctcaatgggctctgcttgagcaagggcaaccctgagtgtgacgggaaggaggactgtagcgacggctcagatgagaaggactgcgactgtgggctgcggtcattcacgagacaggctcgtgttgttgggggcacggatgcggatgagggcgagtggccctggcaggtaagcctgcatgctctgggccagggccacatctgcggtgcttccctcatctctcccaactggctggtctctgccgcacactgctacatcgatgacagaggattcaggtactcagaccccacgcagtggacggccttcctgggcttgcacgaccagagccagcgcagcgcccctggggtgcaggagcgcaggctcaagcgcatcatctcccaccccttcttcaatgacttcaccttcgactatgacatcgcgctgctggagctggagaaaccggcagagtacagctccatggtgcggcccatctgcctgccggacgcctcccatgtcttccctgccggcaaggccatctgggtcacgggctggggacacacccagtatggaggcactggcgcgctgatcctgcaaaagggtgagatccgcgtcatcaaccagaccacctgcgagaacctcctgccgcagcacatcacgccgcgcatgatgtgcgtgggcttcctcagcggcggcgtggactcctgccagggtgattccgggggacccctgtccagcgtggaggcggatgggcggatcttccaggccggtgtggtgagctggggagacggctgcgctcagaggaacaagccaggcgtgtacacaaggctccctctgtttcgggactggatcaaagagaacactggggtataggggccggggccacccaaatgtgtacacctgcggggccacccatcgtccaccccagtgtgcacgcctgcaggctggagactggaccgctgactgcaccagcgcccccagaacatacactgtgaactcaatctccagggctccaaatctgcctagaaaacctctcgcttcctcagcctccaaagtggagctgggaggtagaaggggaggacactggtggttctactgacccaactgggggcaaaggtttgaagacacagcctcccccgccagccccaagctgggccgaggcgcgtttgtgtatatctgcctcccctgtctgtaaggagcagcgggaacggagcttcggagcctcctcagtgaaggtggtggggctgccggatctgggctgtggggcccttgggccacgctcttgaggaagcccaggctcggaggaccctggaaaacagacgggtctgagactgaaaatggtttaccagctcccaggtgacttcagtgtgtgtattgtgtaaatgagtaaaacattttatttctttttaaaaaaaaaaa

SEQ ID NO: 496 - DNA, 3149 bp, Homo sapiens
gacgcctgtgagacccgcgagcggcctcggggaccatggggagcgatcgggcccgcaagggcggagggggcccgaaggacttcggcgcgggactcaagtacaactcccggcacgagaaagtgaatggcttggaggaaggcgtggagttcctgccagtcaacaacgtcaagaaggtggaaaagcatggcccggggcgctgggtggtgctggcagccgtgctgatcggcctcctcttggtcttgctggggatcggcttcctggtgtggcatttgcagtaccgggacgtgcgtgtccagaaggtcttcaatggctacatgaggatcacaaatgagaattttgtggatgcctacgagaactccaactccactgagtttgtaagcctggccagcaaggtgaaggacgcgctgaagctgctgtacagcggagtcccattcctgggcccctaccacaaggagtcggctgtgacggccttcagcgagggcagcgtcatcgcctactactggtctgagttcagcatcccgcagcacctggtggaggaggccgagcgcgtcatggccgaggagcgcgtagtcatgctgcccccgcgggcgcgctccctgaagtcctttgtggtcacctcagtggtggctttccccacggactccaaaacagtacagaggacccaggacaacagctgcagctttggcctgcacgcccgcggtgtggagctgatgcgcttcaccacgcccggcttccctgacagcccctaccccgctcatgcccgctgccagtgggccctgcggggggacgccgactcagtgctgagcctcaccttccgcagctttgaccttgcgtcctgcgacgagcgcggcagcgacctggtgacggtgtacaacaccctgagccccatggagccccacgccctggtgcagttgtgtggcacctaccctccctcctacaacctgaccttccactcctcccagaacgtcctgctcatcacactgataaccaacactgagcggcggcatcccggctttgaggccaccttcttccagctgcctaggatgagcagctgtggaggccgcttacgtaaagcccaggggacattcaacagcccctactacccaggccactacccacccaacattgactgcacatggaacattgaggtgcccaacaaccagcatgtgaaggtgcgcttcaaattcttctacctgctggagcccggcgtgcctgcgggcacctgccccaaggactacgtggagatcaatggggagaaatactgcggagagaggtcccagttcgtcgtcaccagcaacagcaacaagatcacagttcgcttccactcagatcagtcctacaccgacaccggcttcttagctgaatacctctcctacgactccagtgacccatgcccggggcagttcacgtgccgcacggggcggtgtatccggaaggagctgcgctgtgatggctgggccgactgcaccgaccacagcgatgagctcaactgcagttgcgacgccggccaccagttcacgtgcaagaacaagttctgcaagcccctcttctgggtctgcgacagtgtgaacgactgcggagacaacagcgacgagcaggggtgcagttgtccggcccagaccttcaggtgttccaatgggaagtgcctctcgaaaagccagcagtgcaatgggaaggacgactgtggggacgggtccgacgaggcctcctgccccaaggtgaacgtcgtcacttgtaccaaacacacctaccgctgcctcaatgggctctgcttgagcaagggcaaccctgagtgtgacgggaaggaggactgtagcgacggctcagatgagaaggactgcgactgtgggctgcggtcattcacgagacaggctcgtgttgttgggggcacggatgcggatgagggcgagtggccctggcaggtaagcctgcatgctctgggccagggccacatctgcggtgcttccctcatctctcccaactggctggtctctgccgcacactgctacatcgatgacagaggattcaggtactcagaccccacgcagtggacggccttcctgggcttgcacgaccagagccagcgcagcgcccctggggtgcaggagcgcaggctcaagcgcatcatctcccaccccttcttcaatgacttcaccttcgactatgacatcgcgctgctggagctggagaaaccggcagagtacagctccatggtgcggcccatctgcctgccggacgcctcccatgtcttccctgccggcaaggccatctgggtcacgggctggggacacacccagtatggaggcactggcgcgctgatcctgcaaaagggtgagatccgcgtcatcaaccagaccacctgcgagaacctcctgccgcagcagatcacgccgcgcatgatgtgcgtgggcttcctcagcggcggcgtggactcctgccagggtgattccgggggacccctgtccagcgtggaggcggatgggcggatcttccaggccggtgtggtgagctggggacaaggctgcgctcagaggaacaagccaggcgtgtacacaaggctccctctgtttcgggactggatcaaagagaacactggggtataggggccggggccacccaaatgtgtacacctgcggggccacccatcgtccaccccagtgtgcacgcctgcaggctggagactggaccgctgactgcaccagcgcccccagaacatacactgtgaactcaatctccagggctccaaatctgcctagaaaacctctcgcttcctcagcctccaaagtggagctgggaggtagaaggggaggacactggtggttctactgacccaactgggggcaaaggtttgaagacacagcctcccccgccagccccaagctgggccgaggcgcgtttgtgtatatctgcctcccctgtctgtaaggagcagcgggaacggagcttcggagcctcctcagtgaaggtggtggggctgccggatctgggctgtggggcccttgggccacgctcttgaggaagcccaggctcggaggaccctggaaaacagacgggtctgagactgaaaatggtttaccagctcccaggtgacttcagtgtgtgtattgtgtaaatgagtaaaacattttatttctttttaaaaaaaaaaa

SEQ ID NO: 497 - DNA, 3149 bp, Homo sapiens
gacgcctgtgagacccgcgagcggcctcggggaccatggggagcgatcgggcccgcaagggcggagggggcccgaaggacttcggcgcgggactcaagtacaactcccggcacgagaaagtgaatggcttggaggaaggcgtggagttcctgccagtcaacaacgtcaagaaggtggaaaagcatggcccggggcgctgggtggtgctggcagccgtgctgatcggcctcctcttggtcttgctggggatcggcttcctggtgtggcatttgcagtaccgggacgtgcgtgtccagaaggtcttcaatggctacatgaggatcacaaatgagaattttgtggatgcctacgagaactccaactccactgagtttgtaagcctggccagcaaggtgaaggacgcgctgaagctgctgtacagcggagtcccattcctgggcccctaccacaaggagtcggctgtgacggccttcagcgagggcagcgtcatcgcctactactggtctgagttcagcatcccgcagcacctggtggaggaggccgagcgcgtcatggccgaggagcgcgtagtcatgctgcccccgcgggcgcgctccctgaagtcctttgtggtcacctcagtggtggctttccccacggactccaaaacagtacagaggacccaggacaacagctgcagctttggcctgcacgcccgcggtgtggagctgatgcgcttcaccacgcccggcttccctgacagcccctaccccgctcatgcccgctgccagtgggccctgcggggggacgccgactcagtgctgagcctcaccttccgcagctttgaccttgcgtcctgcgacgagcgcggcagcgacctggtgacggtgtacaacaccctgagccccatggagccccacgccctggtgcagttgtgtggcacctaccctccctcctacaacctgaccttccactcctcccagaacgtcctgctcatcacactgataaccaacactgagcggcggcatcccggctttgaggccaccttcttccagctgcctaggatgagcagctgtggaggccgcttacgtaaagcccaggggacattcaacagcccctactacccaggccactacccacccaacattgactgcacatggaacattgaggtgcccaacaaccagcatgtgaaggtgcgcttcaaattcttctacctgctggagcccggcgtgcctgcgggcacctgccccaaggactacgtggagatcaatggggagaaatactgcggagagaggtcccagttcgtcgtcaccagcaacagcaacaagatcacagttcgcttccactcagatcagtcctacaccgacaccggcttcttagctgaatacctctcctacgactccagtgacccatgcccggggcagttcacgtgccgcacggggcggtgtatccggaaggagctgcgctgtgatggctgggccgactgcaccgaccacagcgatgagctcaactgcagttgcgacgccggccaccagttcacgtgcaagaacaagttctgcaagcccctcttctgggtctgcgacagtgtgaacgactgcggagacaacagcgacgagcaggggtgcagttgtccggcccagaccttcaggtgttccaatgggaagtgcctctcgaaaagccagcagtgcaatgggaaggacgactgtggggacgggtccgacgaggcctcctgccccaaggtgaacgtcgtcacttgtaccaaacacacctaccgctgcctcaatgggctctgcttgagcaagggcaaccctgagtgtgacgggaaggaggactgtagcgacggctcagatgagaaggactgcgactgtgggctgcggtcattcacgagacaggctcgtgttgttgggggcacggatgcggatgagggcgagtggccctggcaggtaagcctgcatgctctgggccagggccacatctgcggtgcttccctcatctctcccaactggctggtctctgccgcacactgctacatcgatgacagaggattcaggtactcagaccccacgcagtggacggccttcctgggcttgcacgaccagagccagcgcagcgcccctggggtgcaggagcgcaggctcaagcgcatcatctcccaccccttcttcaatgacttcaccttcgactatgacatcgcgctgctggagctggagaaaccggcagagtacagctccatggtgcggcccatctgcctgccggacgcctcccatgtcttccctgccggcaaggccatctgggtcacgggctggggacacacccagtatggaggcactggcgcgctgatcctgcaaaagggtgagatccgcgtcatcaaccagaccacctgcgagaacctcctgccgcagcagatcacgccgcgcatgatgtgcgtgggcttcctcagcggcggcgtggactcctgccagggtgattccgggggacccctgtccagcgtggaggcggatgggcggatcttccaggccggtgtggtgagctggggaaacggctgcgctcagaggaacaagccaggcgtgtacacaaggctccctctgtttcgggactggatcaaagagaacactggggtataggggccggggccacccaaatgtgtacacctgcggggccacccatcgtccaccccagtgtgcacgcctgcaggctggagactggaccgctgactgcaccagcgcccccagaacatacactgtgaactcaatctccagggctccaaatctgcctagaaaacctctcgcttcctcagcctccaaagtggagctgggaggtagaaggggaggacactggtggttctactgacccaactgggggcaaaggtttgaagacacagcctcccccgccagccccaagctgggccgaggcgcgtttgtgtatatctgcctcccctgtctgtaaggagcagcgggaacggagcttcggagcctcctcagtgaaggtggtggggctgccggatctgggctgtggggcccttgggccacgctcttgaggaagcccaggctcggaggaccctggaaaacagacgggtctgagactgaaaatggtttaccagctcccaggtgacttcagtgtgtgtattgtgtaaatgagtaaaacattttatttctttttaaaaaaaaaaa

SEQ ID NO: 498 - DNA, 3149 bp, Homo sapiens
gacgcctgtgagacccgcgagcggcctcggggaccatggggagcgatcgggcccgcaagggcggagggggcccgaaggacttcggcgcgggactcaagtacaactcccggcacgagaaagtgaatggcttggaggaaggcgtggagttcctgccagtcaacaacgtcaagaaggtggaaaagcatggcccggggcgctgggtggtgctggcagccgtgctgatcggcctcctcttggtcttgctggggatcggcttcctggtgtggcatttgcagtaccgggacgtgcgtgtccagaaggtcttcaatggctacatgaggatcacaaatgagaattttgtggatgcctacgagaactccaactccactgagtttgtaagcctggccagcaaggtgaaggacgcgctgaagctgctgtacagcggagtcccattcctgggcccctaccacaaggagtcggctgtgacggccttcagcgagggcagcgtcatcgcctactactggtctgagttcagcatcccgcagcacctggtggaggaggccgagcgcgtcatggccgaggagcgcgtagtcatgctgcccccgcgggcgcgctccctgaagtcctttgtggtcacctcagtggtggctttccccacggactccaaaacagtacagaggacccaggacaacagctgcagctttggcctgcacgcccgcggtgtggagctgatgcgcttcaccacgcccggcttccctgacagcccctaccccgctcatgcccgctgccagtgggccctgcggggggacgccgactcagtgctgagcctcaccttccgcagctttgaccttgcgtcctgcgacgagcgcggcagcgacctggtgacggtgtacaacaccctgagccccatggagccccacgccctggtgcagttgtgtggcacctaccctccctcctacaacctgaccttccactcctcccagaacgtcctgctcatcacactgataaccaacactgagcggcggcatcccggctttgaggccaccttcttccagctgcctaggatgagcagctgtggaggccgcttacgtaaagcccaggggacattcaacagcccctactacccaggccactacccacccaacattgactgcacatggaacattgaggtgcccaacaaccagcatgtgaaggtgcgcttcaaattcttctacctgctggagcccggcgtgcctgcgggcacctgccccaaggactacgtggagatcaatggggagaaatactgcggagagaggtcccagttcgtcgtcaccagcaacagcaacaagatcacagttcgcttccactcagatcagtcctacaccgacaccggcttcttagctgaatacctctcctacgactccagtgacccatgcccggggcagttcacgtgccgcacggggcggtgtatccggaaggagctgcgctgtgatggctgggccgactgcaccgaccacagcgatgagctcaactgcagttgcgacgccggccaccagttcacgtgcaagaacaagttctgcaagcccctcttctgggtctgcgacagtgtgaacgactgcggagacaacagcgacgagcaggggtgcagttgtccggcccagaccttcaggtgttccaatgggaagtgcctctcgaaaagccagcagtgcaatgggaaggacgactgtggggacgggtccgacgaggcctcctgccccaaggtgaacgtcgtcacttgtaccaaacacacctaccgctgcctcaatgggctctgcttgagcaagggcaaccctgagtgtgacgggaaggaggactgtagcgacggctcagatgagaaggactgcgactgtgggctgcggtcattcacgagacaggctcgtgttgttgggggcacggatgcggatgagggcgagtggccctggcaggtaagcctgcatgctctgggccagggccacatctgcggtgcttccctcatctctcccaactggctggtctctgccgcacactgctacatcgatgacagaggattcaggtactcagaccccacgcagtggacggccttcctgggcttgcacgaccagagccagcgcagcgcccctggggtgcaggagcgcaggctcaagcgcatcatctcccaccccttcttcaatgacttcaccttcgactatgacatcgcgctgctggagctggagaaaccggcagagtacagctccatggtgcggcccatctgcctgccggacgcctcccatgtcttccctgccggcaaggccatctgggtcacgggctggggacacacccagtatggaggcactggcgcgctgatcctgcaaaagggtgagatccgcgtcatcaaccagaccacctgcgagaacctcctgccgcagcagatcacgccgcgcatgatgtgcgtgggcttcctcagcggcggcgtggactcctgccagggtgattccgggggacccctgtccagcgtggaggcggatgggcggatcttccaggccggtgtggtgagctggggacacggctgcgctcagaggaacaagccaggcgtgtacacaaggctccctctgtttcgggactggatcaaagagaacactggggtataggggccggggccacccaaatgtgtacacctgcggggccacccatcgtccaccccagtgtgcacgcctgcaggctggagactggaccgctgactgcaccagcgcccccagaacatacactgtgaactcaatctccagggctccaaatctgcctagaaaacctctcgcttcctcagcctccaaagtggagctgggaggtagaaggggaggacactggtggttctactgacccaactgggggcaaaggtttgaagacacagcctcccccgccagccccaagctgggccgaggcgcgtttgtgtatatctgcctcccctgtctgtaaggagcagcgggaacggagcttcggagcctcctcagtgaaggtggtggggctgccggatctgggctgtggggcccttgggccacgctcttgaggaagcccaggctcggaggaccctggaaaacagacgggtctgagactgaaaatggtttaccagctcccaggtgacttcagtgtgtgtattgtgtaaatgagtaaaacattttatttctttttaaaaaaaaaaa

SEQ ID NO: 499 - DNA, 3149 bp, Homo sapiens
gacgcctgtgagacccgcgagcggcctcggggaccatggggagcgatcgggcccgcaagggcggagggggcccgaaggacttcggcgcgggactcaagtacaactcccggcacgagaaagtgaatggcttggaggaaggcgtggagttcctgccagtcaacaacgtcaagaaggtggaaaagcatggcccggggcgctgggtggtgctggcagccgtgctgatcggcctcctcttggtcttgctggggatcggcttcctggtgtggcatttgcagtaccgggacgtgcgtgtccagaaggtcttcaatggctacatgaggatcacaaatgagaattttgtggatgcctacgagaactccaactccactgagtttgtaagcctggccagcaaggtgaaggacgcgctgaagctgctgtacagcggagtcccattcctgggcccctaccacaaggagtcggctgtgacggccttcagcgagggcagcgtcatcgcctactactggtctgagttcagcatcccgcagcacctggtggaggaggccgagcgcgtcatggccgaggagcgcgtagtcatgctgcccccgcgggcgcgctccctgaagtcctttgtggtcacctcagtggtggctttccccacggactccaaaacagtacagaggacccaggacaacagctgcagctttggcctgcacgcccgcggtgtggagctgatgcgcttcaccacgcccggcttccctgacagcccctaccccgctcatgcccgctgccagtgggccctgcggggggacgccgactcagtgctgagcctcaccttccgcagctttgaccttgcgtcctgcgacgagcgcggcagcgacctggtgacggtgtacaacaccctgagccccatggagccccacgccctggtgcagttgtgtggcacctaccctccctcctacaacctgaccttccactcctcccagaacgtcctgctcatcacactgataaccaacactgagcggcggcatcccggctttgaggccaccttcttccagctgcctaggatgagcagctgtggaggccgcttacgtaaagcccaggggacattcaacagcccctactacccaggccactacccacccaacattgactgcacatggaacattgaggtgcccaacaaccagcatgtgaaggtgcgcttcaaattcttctacctgctggagcccggcgtgcctgcgggcacctgccccaaggactacgtggagatcaatggggagaaatactgcggagagaggtcccagttcgtcgtcaccagcaacagcaacaagatcacagttcgcttccactcagatcagtcctacaccgacaccggcttcttagctgaatacctctcctacgactccagtgacccatgcccggggcagttcacgtgccgcacggggcggtgtatccggaaggagctgcgctgtgatggctgggccgactgcaccgaccacagcgatgagctcaactgcagttgcgacgccggccaccagttcacgtgcaagaacaagttctgcaagcccctcttctgggtctgcgacagtgtgaacgactgcggagacaacagcgacgagcaggggtgcagttgtccggcccagaccttcaggtgttccaatgggaagtgcctctcgaaaagccagcagtgcaatgggaaggacgactgtggggacgggtccgacgaggcctcctgccccaaggtgaacgtcgtcacttgtaccaaacacacctaccgctgcctcaatgggctctgcttgagcaagggcaaccctgagtgtgacgggaaggaggactgtagcgacggctcagatgagaaggactgcgactgtgggctgcggtcattcacgagacaggctcgtgttgttgggggcacggatgcggatgagggcgagtggccctggcaggtaagcctgcatgctctgggccagggccacatctgcggtgcttccctcatctctcccaactggctggtctctgccgcacactgctacatcgatgacagaggattcaggtactcagaccccacgcagtggacggccttcctgggcttgcacgaccagagccagcgcagcgcccctggggtgcaggagcgcaggctcaagcgcatcatctcccaccccttcttcaatgccttcaccttcgactatgacatcgcgctgctggagctggagaaaccggcagagtacagctccatggtgcggcccatctgcctgccggacgcctcccatgtcttccctgccggcaaggccatctgggtcacgggctggggacacacccagtatggaggcactggcgcgctgatcctgcaaaagggtgagatccgcgtcatcaaccagaccacctgcgagaacctcctgccgcagcagatcacgccgcgcatgatgtgcgtgggcttcctcagcggcggcgtggactcctgccagggtgattccgggggacccctgtccagcgtggaggcggatgggcggatcttccaggccggtgtggtgagctggggagacggctgcgctcagaggaacaagccaggcgtgtacacaaggctccctctgtttcgggactggatcaaagagaacactggggtataggggccggggccacccaaatgtgtacacctgcggggccacccatcgtccaccccagtgtgcacgcctgcaggctggagactggaccgctgactgcaccagcgcccccagaacatacactgtgaactcaatctccagggctccaaatctgcctagaaaacctctcgcttcctcagcctccaaagtggagctgggaggtagaaggggaggacactggtggttctactgacccaactgggggcaaaggtttgaagacacagcctcccccgccagccccaagctgggccgaggcgcgtttgtgtatatctgcctcccctgtctgtaaggagcagcgggaacggagcttcggagcctcctcagtgaaggtggtggggctgccggatctgggctgtggggcccttgggccacgctcttgaggaagcccaggctcggaggaccctggaaaacagacgggtctgagactgaaaatggtttaccagctcccaggtgacttcagtgtgtgtattgtgtaaatgagtaaaacattttatttctttttaaaaaaaaaaa

SEQ ID NO: 500 - DNA, 3149 bp, Homo sapiens
gacgcctgtgagacccgcgagcggcctcggggaccatggggagcgatcgggcccgcaagggcggagggggcccgaaggacttcggcgcgggactcaagtacaactcccggcacgagaaagtgaatggcttggaggaaggcgtggagttcctgccagtcaacaacgtcaagaaggtggaaaagcatggcccggggcgctgggtggtgctggcagccgtgctgatcggcctcctcttggtcttgctggggatcggcttcctggtgtggcatttgcagtaccgggacgtgcgtgtccagaaggtcttcaatggctacatgaggatcacaaatgagaattttgtggatgcctacgagaactccaactccactgagtttgtaagcctggccagcaaggtgaaggacgcgctgaagctgctgtacagcggagtcccattcctgggcccctaccacaaggagtcggctgtgacggccttcagcgagggcagcgtcatcgcctactactggtctgagttcagcatcccgcagcacctggtggaggaggccgagcgcgtcatggccgaggagcgcgtagtcatgctgcccccgcgggcgcgctccctgaagtcctttgtggtcacctcagtggtggctttccccacggactccaaaacagtacagaggacccaggacaacagctgcagctttggcctgcacgcccgcggtgtggagctgatgcgcttcaccacgcccggcttccctgacagcccctaccccgctcatgcccgctgccagtgggccctgcggggggacgccgactcagtgctgagcctcaccttccgcagctttgaccttgcgtcctgcgacgagcgcggcagcgacctggtgacggtgtacaacaccctgagccccatggagccccacgccctggtgcagttgtgtggcacctaccctccctcctacaacctgaccttccactcctcccagaacgtcctgctcatcacactgataaccaacactgagcggcggcatcccggctttgaggccaccttcttccagctgcctaggatgagcagctgtggaggccgcttacgtaaagcccaggggacattcaacagcccctactacccaggccactacccacccaacattgactgcacatggaacattgaggtgcccaacaaccagcatgtgaaggtgcgcttcaaattcttctacctgctggagcccggcgtgcctgcgggcacctgccccaaggactacgtggagatcaatggggagaaatactgcggagagaggtcccagttcgtcgtcaccagcaacagcaacaagatcacagttcgcttccactcagatcagtcctacaccgacaccggcttcttagctgaatacctctcctacgactccagtgacccatgcccggggcagttcacgtgccgcacggggcggtgtatccggaaggagctgcgctgtgatggctgggccgactgcaccgaccacagcgatgagctcaactgcagttgcgacgccggccaccagttcacgtgcaagaacaagttctgcaagcccctcttctgggtctgcgacagtgtgaacgactgcggagacaacagcgacgagcaggggtgcagttgtccggcccagaccttcaggtgttccaatgggaagtgcctctcgaaaagccagcagtgcaatgggaaggacgactgtggggacgggtccgacgaggcctcctgccccaaggtgaacgtcgtcacttgtaccaaacacacctaccgctgcctcaatgggctctgcttgagcaagggcaaccctgagtgtgacgggaaggaggactgtagcgacggctcagatgagaaggactgcgactgtgggctgcggtcattcacgagacaggctcgtgttgttgggggcacggatgcggatgagggcgagtggccctggcaggtaagcctgcatgctctgggccagggccacatctgcggtgcttccctcatctctcccaactggctggtctctgccgcacactgctacatcgatgacagaggattcaggtactcagaccccacgcagtggacggccttcctgggcttgcacgaccagagccagcgcagcgcccctggggtgcaggagcgcaggctcaagcgcatcatctcccaccccttcttcaatgtcttcaccttcgactatgacatcgcgctgctggagctggagaaaccggcagagtacagctccatggtgcggcccatctgcctgccggacgcctcccatgtcttccctgccggcaaggccatctgggtcacgggctggggacacacccagtatggaggcactggcgcgctgatcctgcaaaagggtgagatccgcgtcatcaaccagaccacctgcgagaacctcctgccgcagcagatcacgccgcgcatgatgtgcgtgggcttcctcagcggcggcgtggactcctgccagggtgattccgggggacccctgtccagcgtggaggcggatgggcggatcttccaggccggtgtggtgagctggggagacggctgcgctcagaggaacaagccaggcgtgtacacaaggctccctctgtttcgggactggatcaaagagaacactggggtataggggccggggccacccaaatgtgtacacctgcggggccacccatcgtccaccccagtgtgcacgcctgcaggctggagactggaccgctgactgcaccagcgcccccagaacatacactgtgaactcaatctccagggctccaaatctgcctagaaaacctctcgcttcctcagcctccaaagtggagctgggaggtagaaggggaggacactggtggttctactgacccaactgggggcaaaggtttgaagacacagcctcccccgccagccccaagctgggccgaggcgcgtttgtgtatatctgcctcccctgtctgtaaggagcagcgggaacggagcttcggagcctcctcagtgaaggtggtggggctgccggatctgggctgtggggcccttgggccacgctcttgaggaagcccaggctcggaggaccctggaaaacagacgggtctgagactgaaaatggtttaccagctcccaggtgacttcagtgtgtgtattgtgtaaatgagtaaaacattttatttctttttaaaaaaaaaaa

SEQ ID NO: 501 - DNA, 3149 bp, Homo sapiens
gacgcctgtgagacccgcgagcggcctcggggaccatggggagcgatcgggcccgcaagggcggagggggcccgaaggacttcggcgcgggactcaagtacaactcccggcacgagaaagtgaatggcttggaggaaggcgtggagttcctgccagtcaacaacgtcaagaaggtggaaaagcatggcccggggcgctgggtggtgctggcagccgtgctgatcggcctcctcttggtcttgctggggatcggcttcctggtgtggcatttgcagtaccgggacgtgcgtgtccagaaggtcttcaatggctacatgaggatcacaaatgagaattttgtggatgcctacgagaactccaactccactgagtttgtaagcctggccagcaaggtgaaggacgcgctgaagctgctgtacagcggagtcccattcctgggcccctaccacaaggagtcggctgtgacggccttcagcgagggcagcgtcatcgcctactactggtctgagttcagcatcccgcagcacctggtggaggaggccgagcgcgtcatggccgaggagcgcgtagtcatgctgcccccgcgggcgcgctccctgaagtcctttgtggtcacctcagtggtggctttccccacggactccaaaacagtacagaggacccaggacaacagctgcagctttggcctgcacgcccgcggtgtggagctgatgcgcttcaccacgcccggcttccctgacagcccctaccccgctcatgcccgctgccagtgggccctgcggggggacgccgactcagtgctgagcctcaccttccgcagctttgaccttgcgtcctgcgacgagcgcggcagcgacctggtgacggtgtacaacaccctgagccccatggagccccacgccctggtgcagttgtgtggcacctaccctccctcctacaacctgaccttccactcctcccagaacgtcctgctcatcacactgataaccaacactgagcggcggcatcccggctttgaggccaccttcttccagctgcctaggatgagcagctgtggaggccgcttacgtaaagcccaggggacattcaacagcccctactacccaggccactacccacccaacattgactgcacatggaacattgaggtgcccaacaaccagcatgtgaaggtgcgcttcaaattcttctacctgctggagcccggcgtgcctgcgggcacctgccccaaggactacgtggagatcaatggggagaaatactgcggagagaggtcccagttcgtcgtcaccagcaacagcaacaagatcacagttcgcttccactcagatcagtcctacaccgacaccggcttcttagctgaatacctctcctacgactccagtgacccatgcccggggcagttcacgtgccgcacggggcggtgtatccggaaggagctgcgctgtgatggctgggccgactgcaccgaccacagcgatgagctcaactgcagttgcgacgccggccaccagttcacgtgcaagaacaagttctgcaagcccctcttctgggtctgcgacagtgtgaacgactgcggagacaacagcgacgagcaggggtgcagttgtccggcccagaccttcaggtgttccaatgggaagtgcctctcgaaaagccagcagtgcaatgggaaggacgactgtggggacgggtccgacgaggcctcctgccccaaggtgaacgtcgtcacttgtaccaaacacacctaccgctgcctcaatgggctctgcttgagcaagggcaaccctgagtgtgacgggaaggaggactgtagcgacggctcagatgagaaggactgcgactgtgggctgcggtcattcacgagacaggctcgtgttgttgggggcacggatgcggatgagggcgagtggccctggcaggtaagcctgcatgctctgggccagggccacatctgcggtgcttccctcatctctcccaactggctggtctctgccgcacactgctacatcgatgacagaggattcaggtactcagaccccacgcagtggacggccttcctgggcttgcacgaccagagccagcgcagcgcccctggggtgcaggagcgcaggctcaagcgcatcatctcccaccccttcttcaatttcttcaccttcgactatgacatcgcgctgctggagctggagaaaccggcagagtacagctccatggtgcggcccatctgcctgccggacgcctcccatgtcttccctgccggcaaggccatctgggtcacgggctggggacacacccagtatggaggcactggcgcgctgatcctgcaaaagggtgagatccgcgtcatcaaccagaccacctgcgagaacctcctgccgcagcagatcacgccgcgcatgatgtgcgtgggcttcctcagcggcggcgtggactcctgccagggtgattccgggggacccctgtccagcgtggaggcggatgggcggatcttccaggccggtgtggtgagctggggagacggctgcgctcagaggaacaagccaggcgtgtacacaaggctccctctgtttcgggactggatcaaagagaacactggggtataggggccggggccacccaaatgtgtacacctgcggggccacccatcgtccaccccagtgtgcacgcctgcaggctggagactggaccgctgactgcaccagcgcccccagaacatacactgtgaactcaatctccagggctccaaatctgcctagaaaacctctcgcttcctcagcctccaaagtggagctgggaggtagaaggggaggacactggtggttctactgacccaactgggggcaaaggtttgaagacacagcctcccccgccagccccaagctgggccgaggcgcgtttgtgtatatctgcctcccctgtctgtaaggagcagcgggaacggagcttcggagcctcctcagtgaaggtggtggggctgccggatctgggctgtggggcccttgggccacgctcttgaggaagcccaggctcggaggaccctggaaaacagacgggtctgagactgaaaatggtttaccagctcccaggtgacttcagtgtgtgtattgtgtaaatgagtaaaacattttatttctttttaaaaaaaaaaa

SEQ ID NO: 502 - DNA, 3149 bp, Homo sapiens
gacgcctgtgagacccgcgagcggcctcggggaccatggggagcgatcgggcccgcaagggcggagggggcccgaaggacttcggcgcgggactcaagtacaactcccggcacgagaaagtgaatggcttggaggaaggcgtggagttcctgccagtcaacaacgtcaagaaggtggaaaagcatggcccggggcgctgggtggtgctggcagccgtgctgatcggcctcctcttggtcttgctggggatcggcttcctggtgtggcatttgcagtaccgggacgtgcgtgtccagaaggtcttcaatggctacatgaggatcacaaatgagaattttgtggatgcctacgagaactccaactccactgagtttgtaagcctggccagcaaggtgaaggacgcgctgaagctgctgtacagcggagtcccattcctgggcccctaccacaaggagtcggctgtgacggccttcagcgagggcagcgtcatcgcctactactggtctgagttcagcatcccgcagcacctggtggaggaggccgagcgcgtcatggccgaggagcgcgtagtcatgctgcccccgcgggcgcgctccctgaagtcctttgtggtcacctcagtggtggctttccccacggactccaaaacagtacagaggacccaggacaacagctgcagctttggcctgcacgcccgcggtgtggagctgatgcgcttcaccacgcccggcttccctgacagcccctaccccgctcatgcccgctgccagtgggccctgcggggggacgccgactcagtgctgagcctcaccttccgcagctttgaccttgcgtcctgcgacgagcgcggcagcgacctggtgacggtgtacaacaccctgagccccatggagccccacgccctggtgcagttgtgtggcacctaccctccctcctacaacctgaccttccactcctcccagaacgtcctgctcatcacactgataaccaacactgagcggcggcatcccggctttgaggccaccttcttccagctgcctaggatgagcagctgtggaggccgcttacgtaaagcccaggggacattcaacagcccctactacccaggccactacccacccaacattgactgcacatggaacattgaggtgcccaacaaccagcatgtgaaggtgcgcttcaaattcttctacctgctggagcccggcgtgcctgcgggcacctgccccaaggactacgtggagatcaatggggagaaatactgcggagagaggtcccagttcgtcgtcaccagcaacagcaacaagatcacagttcgcttccactcagatcagtcctacaccgacaccggcttcttagctgaatacctctcctacgactccagtgacccatgcccggggcagttcacgtgccgcacggggcggtgtatccggaaggagctgcgctgtgatggctgggccgactgcaccgaccacagcgatgagctcaactgcagttgcgacgccggccaccagttcacgtgcaagaacaagttctgcaagcccctcttctgggtctgcgacagtgtgaacgactgcggagacaacagcgacgagcaggggtgcagttgtccggcccagaccttcaggtgttccaatgggaagtgcctctcgaaaagccagcagtgcaatgggaaggacgactgtggggacgggtccgacgaggcctcctgccccaaggtgaacgtcgtcacttgtaccaaacacacctaccgctgcctcaatgggctctgcttgagcaagggcaaccctgagtgtgacgggaaggaggactgtagcgacggctcagatgagaaggactgcgactgtgggctgcggtcattcacgagacaggctcgtgttgttgggggcacggatgcggatgagggcgagtggccctggcaggtaagcctgcatgctctgggccagggccacatctgcggtgcttccctcatctctcccaactggctggtctctgccgcacactgctacatcgatgacagaggattcaggtactcagaccccacgcagtggacggccttcctgggcttgcacgaccagagccagcgcagcgcccctggggtgcaggagcgcaggctcaagcgcatcatctcccaccccttcttcaattccttcaccttcgactatgacatcgcgctgctggagctggagaaaccggcagagtacagctccatggtgcggcccatctgcctgccggacgcctcccatgtcttccctgccggcaaggccatctgggtcacgggctggggacacacccagtatggaggcactggcgcgctgatcctgcaaaagggtgagatccgcgtcatcaaccagaccacctgcgagaacctcctgccgcagcagatcacgccgcgcatgatgtgcgtgggcttcctcagcggcggcgtggactcctgccagggtgattccgggggacccctgtccagcgtggaggcggatgggcggatcttccaggccggtgtggtgagctggggagacggctgcgctcagaggaacaagccaggcgtgtacacaaggctccctctgtttcgggactggatcaaagagaacactggggtataggggccggggccacccaaatgtgtacacctgcggggccacccatcgtccaccccagtgtgcacgcctgcaggctggagactggaccgctgactgcaccagcgcccccagaacatacactgtgaactcaatctccagggctccaaatctgcctagaaaacctctcgcttcctcagcctccaaagtggagctgggaggtagaaggggaggacactggtggttctactgacccaactgggggcaaaggtttgaagacacagcctcccccgccagccccaagctgggccgaggcgcgtttgtgtatatctgcctcccctgtctgtaaggagcagcgggaacggagcttcggagcctcctcagtgaaggtggtggggctgccggatctgggctgtggggcccttgggccacgctcttgaggaagcccaggctcggaggaccctggaaaacagacgggtctgagactgaaaatggtttaccagctcccaggtgacttcagtgtgtgtattgtgtaaatgagtaaaacattttatttctttttaaaaaaaaaaa

SEQ ID NO: 503 - DNA, 3149 bp, Homo sapiens
gacgcctgtgagacccgcgagcggcctcggggaccatggggagcgatcgggcccgcaagggcggagggggcccgaaggacttcggcgcgggactcaagtacaactcccggcacgagaaagtgaatggcttggaggaaggcgtggagttcctgccagtcaacaacgtcaagaaggtggaaaagcatggcccggggcgctgggtggtgctggcagccgtgctgatcggcctcctcttggtcttgctggggatcggcttcctggtgtggcatttgcagtaccgggacgtgcgtgtccagaaggtcttcaatggctacatgaggatcacaaatgagaattttgtggatgcctacgagaactccaactccactgagtttgtaagcctggccagcaaggtgaaggacgcgctgaagctgctgtacagcggagtcccattcctgggcccctaccacaaggagtcggctgtgacggccttcagcgagggcagcgtcatcgcctactactggtctgagttcagcatcccgcagcacctggtggaggaggccgagcgcgtcatggccgaggagcgcgtagtcatgctgcccccgcgggcgcgctccctgaagtcctttgtggtcacctcagtggtggctttccccacggactccaaaacagtacagaggacccaggacaacagctgcagctttggcctgcacgcccgcggtgtggagctgatgcgcttcaccacgcccggcttccctgacagcccctaccccgctcatgcccgctgccagtgggccctgcggggggacgccgactcagtgctgagcctcaccttccgcagctttgaccttgcgtcctgcgacgagcgcggcagcgacctggtgacggtgtacaacaccctgagccccatggagccccacgccctggtgcagttgtgtggcacctaccctccctcctacaacctgaccttccactcctcccagaacgtcctgctcatcacactgataaccaacactgagcggcggcatcccggctttgaggccaccttcttccagctgcctaggatgagcagctgtggaggccgcttacgtaaagcccaggggacattcaacagcccctactacccaggccactacccacccaacattgactgcacatggaacattgaggtgcccaacaaccagcatgtgaaggtgcgcttcaaattcttctacctgctggagcccggcgtgcctgcgggcacctgccccaaggactacgtggagatcaatggggagaaatactgcggagagaggtcccagttcgtcgtcaccagcaacagcaacaagatcacagttcgcttccactcagatcagtcctacaccgacaccggcttcttagctgaatacctctcctacgactccagtgacccatgcccggggcagttcacgtgccgcacggggcggtgtatccggaaggagctgcgctgtgatggctgggccgactgcaccgaccacagcgatgagctcaactgcagttgcgacgccggccaccagttcacgtgcaagaacaagttctgcaagcccctcttctgggtctgcgacagtgtgaacgactgcggagacaacagcgacgagcaggggtgcagttgtccggcccagaccttcaggtgttccaatgggaagtgcctctcgaaaagccagcagtgcaatgggaaggacgactgtggggacgggtccgacgaggcctcctgccccaaggtgaacgtcgtcacttgtaccaaacacacctaccgctgcctcaatgggctctgcttgagcaagggcaaccctgagtgtgacgggaaggaggactgtagcgacggctcagatgagaaggactgcgactgtgggctgcggtcattcacgagacaggctcgtgttgttgggggcacggatgcggatgagggcgagtggccctggcaggtaagcctgcatgctctgggccagggccacatctgcggtgcttccctcatctctcccaactggctggtctctgccgcacactgctacatcgatgacagaggattcaggtactcagaccccacgcagtggacggccttcctgggcttgcacgaccagagccagcgcagcgcccctggggtgcaggagcgcaggctcaagcgcatcatctcccaccccttcttcaataccttcaccttcgactatgacatcgcgctgctggagctggagaaaccggcagagtacagctccatggtgcggcccatctgcctgccggacgcctcccatgtcttccctgccggcaaggccatctgggtcacgggctggggacacacccagtatggaggcactggcgcgctgatcctgcaaaagggtgagatccgcgtcatcaaccagaccacctgcgagaacctcctgccgcagcagatcacgccgcgcatgatgtgcgtgggcttcctcagcggcggcgtggactcctgccagggtgattccgggggacccctgtccagcgtggaggcggatgggcggatcttccaggccggtgtggtgagctggggagacggctgcgctcagaggaacaagccaggcgtgtacacaaggctccctctgtttcgggactggatcaaagagaacactggggtataggggccggggccacccaaatgtgtacacctgcggggccacccatcgtccaccccagtgtgcacgcctgcaggctggagactggaccgctgactgcaccagcgcccccagaacatacactgtgaactcaatctccagggctccaaatctgcctagaaaacctctcgcttcctcagcctccaaagtggagctgggaggtagaaggggaggacactggtggttctactgacccaactgggggcaaaggtttgaagacacagcctcccccgccagccccaagctgggccgaggcgcgtttgtgtatatctgcctcccctgtctgtaaggagcagcgggaacggagcttcggagcctcctcagtgaaggtggtggggctgccggatctgggctgtggggcccttgggccacgctcttgaggaagcccaggctcggaggaccctggaaaacagacgggtctgagactgaaaatggtttaccagctcccaggtgacttcagtgtgtgtattgtgtaaatgagtaaaacattttatttctttttaaaaaaaaaaa

SEQ ID NO: 504 - DNA, 3149 bp, Homo sapiens
gacgcctgtgagacccgcgagcggcctcggggaccatggggagcgatcgggcccgcaagggcggagggggcccgaaggacttcggcgcgggactcaagtacaactcccggcacgagaaagtgaatggcttggaggaaggcgtggagttcctgccagtcaacaacgtcaagaaggtggaaaagcatggcccggggcgctgggtggtgctggcagccgtgctgatcggcctcctcttggtcttgctggggatcggcttcctggtgtggcatttgcagtaccgggacgtgcgtgtccagaaggtcttcaatggctacatgaggatcacaaatgagaattttgtggatgcctacgagaactccaactccactgagtttgtaagcctggccagcaaggtgaaggacgcgctgaagctgctgtacagcggagtcccattcctgggcccctaccacaaggagtcggctgtgacggccttcagcgagggcagcgtcatcgcctactactggtctgagttcagcatcccgcagcacctggtggaggaggccgagcgcgtcatggccgaggagcgcgtagtcatgctgcccccgcgggcgcgctccctgaagtcctttgtggtcacctcagtggtggctttccccacggactccaaaacagtacagaggacccaggacaacagctgcagctttggcctgcacgcccgcggtgtggagctgatgcgcttcaccacgcccggcttccctgacagcccctaccccgctcatgcccgctgccagtgggccctgcggggggacgccgactcagtgctgagcctcaccttccgcagctttgaccttgcgtcctgcgacgagcgcggcagcgacctggtgacggtgtacaacaccctgagccccatggagccccacgccctggtgcagttgtgtggcacctaccctccctcctacaacctgaccttccactcctcccagaacgtcctgctcatcacactgataaccaacactgagcggcggcatcccggctttgaggccaccttcttccagctgcctaggatgagcagctgtggaggccgcttacgtaaagcccaggggacattcaacagcccctactacccaggccactacccacccaacattgactgcacatggaacattgaggtgcccaacaaccagcatgtgaaggtgcgcttcaaattcttctacctgctggagcccggcgtgcctgcgggcacctgccccaaggactacgtggagatcaatggggagaaatactgcggagagaggtcccagttcgtcgtcaccagcaacagcaacaagatcacagttcgcttccactcagatcagtcctacaccgacaccggcttcttagctgaatacctctcctacgactccagtgacccatgcccggggcagttcacgtgccgcacggggcggtgtatccggaaggagctgcgctgtgatggctgggccgactgcaccgaccacagcgatgagctcaactgcagttgcgacgccggccaccagttcacgtgcaagaacaagttctgcaagcccctcttctgggtctgcgacagtgtgaacgactgcggagacaacagcgacgagcaggggtgcagttgtccggcccagaccttcaggtgttccaatgggaagtgcctctcgaaaagccagcagtgcaatgggaaggacgactgtggggacgggtccgacgaggcctcctgccccaaggtgaacgtcgtcacttgtaccaaacacacctaccgctgcctcaatgggctctgcttgagcaagggcaaccctgagtgtgacgggaaggaggactgtagcgacggctcagatgagaaggactgcgactgtgggctgcggtcattcacgagacaggctcgtgttgttgggggcacggatgcggatgagggcgagtggccctggcaggtaagcctgcatgctctgggccagggccacatctgcggtgcttccctcatctctcccaactggctggtctctgccgcacactgctacatcgatgacagaggattcaggtactcagaccccacgcagtggacggccttcctgggcttgcacgaccagagccagcgcagcgcccctggggtgcaggagcgcaggctcaagcgcatcatctcccaccccttcttcaatgacttcaccttcgactatgacatcgcgctgctggagctggagaaaccggcagagtacagctccatggtgcggcccatctgcctgccggacgcctcccatgtcttccctgccggcaaggccatctgggtcacgggctggggacacacccagtatggaggcactggcgcgctgatcctgcaaaagggtgagatccgcgtcatcaaccagaccacctgcgagaacctcctgccgcagcagatcacgccgcgcatgatgtgcgtgggcttcctcagcggcggcgtggactcctgcctgggtgattccgggggacccctgtccagcgtggaggcggatgggcggatcttccaggccggtgtggtgagctggggagacggctgcgctcagaggaacaagccaggcgtgtacacaaggctccctctgtttcgggactggatcaaagagaacactggggtataggggccggggccacccaaatgtgtacacctgcggggccacccatcgtccaccccagtgtgcacgcctgcaggctggagactggaccgctgactgcaccagcgcccccagaacatacactgtgaactcaatctccagggctccaaatctgcctagaaaacctctcgcttcctcagcctccaaagtggagctgggaggtagaaggggaggacactggtggttctactgacccaactgggggcaaaggtttgaagacacagcctcccccgccagccccaagctgggccgaggcgcgtttgtgtatatctgcctcccctgtctgtaaggagcagcgggaacggagcttcggagcctcctcagtgaaggtggtggggctgccggatctgggctgtggggcccttgggccacgctcttgaggaagcccaggctcggaggaccctggaaaacagacgggtctgagactgaaaatggtttaccagctcccaggtgacttcagtgtgtgtattgtgtaaatgagtaaaacattttatttctttttaaaaaaaaaaa

SEQ ID NO: 505 - DNA, 3149 bp, Homo sapiens
gacgcctgtgagacccgcgagcggcctcggggaccatggggagcgatcgggcccgcaagggcggagggggcccgaaggacttcggcgcgggactcaagtacaactcccggcacgagaaagtgaatggcttggaggaaggcgtggagttcctgccagtcaacaacgtcaagaaggtggaaaagcatggcccggggcgctgggtggtgctggcagccgtgctgatcggcctcctcttggtcttgctggggatcggcttcctggtgtggcatttgcagtaccgggacgtgcgtgtccagaaggtcttcaatggctacatgaggatcacaaatgagaattttgtggatgcctacgagaactccaactccactgagtttgtaagcctggccagcaaggtgaaggacgcgctgaagctgctgtacagcggagtcccattcctgggcccctaccacaaggagtcggctgtgacggccttcagcgagggcagcgtcatcgcctactactggtctgagttcagcatcccgcagcacctggtggaggaggccgagcgcgtcatggccgaggagcgcgtagtcatgctgcccccgcgggcgcgctccctgaagtcctttgtggtcacctcagtggtggctttccccacggactccaaaacagtacagaggacccaggacaacagctgcagctttggcctgcacgcccgcggtgtggagctgatgcgcttcaccacgcccggcttccctgacagcccctaccccgctcatgcccgctgccagtgggccctgcggggggacgccgactcagtgctgagcctcaccttccgcagctttgaccttgcgtcctgcgacgagcgcggcagcgacctggtgacggtgtacaacaccctgagccccatggagccccacgccctggtgcagttgtgtggcacctaccctccctcctacaacctgaccttccactcctcccagaacgtcctgctcatcacactgataaccaacactgagcggcggcatcccggctttgaggccaccttcttccagctgcctaggatgagcagctgtggaggccgcttacgtaaagcccaggggacattcaacagcccctactacccaggccactacccacccaacattgactgcacatggaacattgaggtgcccaacaaccagcatgtgaaggtgcgcttcaaattcttctacctgctggagcccggcgtgcctgcgggcacctgccccaaggactacgtggagatcaatggggagaaatactgcggagagaggtcccagttcgtcgtcaccagcaacagcaacaagatcacagttcgcttccactcagatcagtcctacaccgacaccggcttcttagctgaatacctctcctacgactccagtgacccatgcccggggcagttcacgtgccgcacggggcggtgtatccggaaggagctgcgctgtgatggctgggccgactgcaccgaccacagcgatgagctcaactgcagttgcgacgccggccaccagttcacgtgcaagaacaagttctgcaagcccctcttctgggtctgcgacagtgtgaacgactgcggagacaacagcgacgagcaggggtgcagttgtccggcccagaccttcaggtgttccaatgggaagtgcctctcgaaaagccagcagtgcaatgggaaggacgactgtggggacgggtccgacgaggcctcctgccccaaggtgaacgtcgtcacttgtaccaaacacacctaccgctgcctcaatgggctctgcttgagcaagggcaaccctgagtgtgacgggaaggaggactgtagcgacggctcagatgagaaggactgcgactgtgggctgcggtcattcacgagacaggctcgtgttgttgggggcacggatgcggatgagggcgagtggccctggcaggtaagcctgcatgctctgggccagggccacatctgcggtgcttccctcatctctcccaactggctggtctctgccgcacactgctacatcgatgacagaggattcaggtactcagaccccacgcagtggacggccttcctgggcttgcacgaccagagccagcgcagcgcccctggggtgcaggagcgcaggctcaagcgcatcatctcccaccccttcttcaatgacttcaccttcgactatgacatcgcgctgctggagctggagaaaccggcagagtacagctccatggtgcggcccatctgcctgccggacgcctcccatgtcttccctgccggcaaggccatctgggtcacgggctggggacacacccagtatggaggcactggcgcgctgatcctgcaaaagggtgagatccgcgtcatcaaccagaccacctgcgagaacctcctgccgcagcagatcacgccgcgcatgatgtgcgtgggcttcctcagcggcggcgtggactcctgcatcggtgattccgggggacccctgtccagcgtggaggcggatgggcggatcttccaggccggtgtggtgagctggggagacggctgcgctcagaggaacaagccaggcgtgtacacaaggctccctctgtttcgggactggatcaaagagaacactggggtataggggccggggccacccaaatgtgtacacctgcggggccacccatcgtccaccccagtgtgcacgcctgcaggctggagactggaccgctgactgcaccagcgcccccagaacatacactgtgaactcaatctccagggctccaaatctgcctagaaaacctctcgcttcctcagcctccaaagtggagctgggaggtagaaggggaggacactggtggttctactgacccaactgggggcaaaggtttgaagacacagcctcccccgccagccccaagctgggccgaggcgcgtttgtgtatatctgcctcccctgtctgtaaggagcagcgggaacggagcttcggagcctcctcagtgaaggtggtggggctgccggatctgggctgtggggcccttgggccacgctcttgaggaagcccaggctcggaggaccctggaaaacagacgggtctgagactgaaaatggtttaccagctcccaggtgacttcagtgtgtgtattgtgtaaatgagtaaaacattttatttctttttaaaaaaaaaaa

SEQ ID NO: 506 - DNA, 3149 bp, Homo sapiens
gacgcctgtgagacccgcgagcggcctcggggaccatggggagcgatcgggcccgcaagggcggagggggcccgaaggacttcggcgcgggactcaagtacaactcccggcacgagaaagtgaatggcttggaggaaggcgtggagttcctgccagtcaacaacgtcaagaaggtggaaaagcatggcccggggcgctgggtggtgctggcagccgtgctgatcggcctcctcttggtcttgctggggatcggcttcctggtgtggcatttgcagtaccgggacgtgcgtgtccagaaggtcttcaatggctacatgaggatcacaaatgagaattttgtggatgcctacgagaactccaactccactgagtttgtaagcctggccagcaaggtgaaggacgcgctgaagctgctgtacagcggagtcccattcctgggcccctaccacaaggagtcggctgtgacggccttcagcgagggcagcgtcatcgcctactactggtctgagttcagcatcccgcagcacctggtggaggaggccgagcgcgtcatggccgaggagcgcgtagtcatgctgcccccgcgggcgcgctccctgaagtcctttgtggtcacctcagtggtggctttccccacggactccaaaacagtacagaggacccaggacaacagctgcagctttggcctgcacgcccgcggtgtggagctgatgcgcttcaccacgcccggcttccctgacagcccctaccccgctcatgcccgctgccagtgggccctgcggggggacgccgactcagtgctgagcctcaccttccgcagctttgaccttgcgtcctgcgacgagcgcggcagcgacctggtgacggtgtacaacaccctgagccccatggagccccacgccctggtgcagttgtgtggcacctaccctccctcctacaacctgaccttccactcctcccagaacgtcctgctcatcacactgataaccaacactgagcggcggcatcccggctttgaggccaccttcttccagctgcctaggatgagcagctgtggaggccgcttacgtaaagcccaggggacattcaacagcccctactacccaggccactacccacccaacattgactgcacatggaacattgaggtgcccaacaaccagcatgtgaaggtgcgcttcaaattcttctacctgctggagcccggcgtgcctgcgggcacctgccccaaggactacgtggagatcaatggggagaaatactgcggagagaggtcccagttcgtcgtcaccagcaacagcaacaagatcacagttcgcttccactcagatcagtcctacaccgacaccggcttcttagctgaatacctctcctacgactccagtgacccatgcccggggcagttcacgtgccgcacggggcggtgtatccggaaggagctgcgctgtgatggctgggccgactgcaccgaccacagcgatgagctcaactgcagttgcgacgccggccaccagttcacgtgcaagaacaagttctgcaagcccctcttctgggtctgcgacagtgtgaacgactgcggagacaacagcgacgagcaggggtgcagttgtccggcccagaccttcaggtgttccaatgggaagtgcctctcgaaaagccagcagtgcaatgggaaggacgactgtggggacgggtccgacgaggcctcctgccccaaggtgaacgtcgtcacttgtaccaaacacacctaccgctgcctcaatgggctctgcttgagcaagggcaaccctgagtgtgacgggaaggaggactgtagcgacggctcagatgagaaggactgcgactgtgggctgcggtcattcacgagacaggctcgtgttgttgggggcacggatgcggatgagggcgagtggccctggcaggtaagcctgcatgctctgggccagggccacatctgcggtgcttccctcatctctcccaactggctggtctctgccgcacactgctacatcgatgacagaggattcaggtactcagaccccacgcagtggacggccttcctgggcttgcacgaccagagccagcgcagcgcccctggggtgcaggagcgcaggctcaagcgcatcatctcccaccccttcttcaatgacttcaccttcgactatgacatcgcgctgctggagctggagaaaccggcagagtacagctccatggtgcggcccatctgcctgccggacgcctcccatgtcttccctgccggcaaggccatctgggtcacgggctggggacacacccagtatggaggcactggcgcgctgatcctgcaaaagggtgagatccgcgtcatcaaccagaccacctgcgagaacctcctgccgcagcagatcacgccgcgcatgatgtgcgtgggcttcctcagcggcggcgtggactcctgcttcggtgattccgggggacccctgtccagcgtggaggcggatgggcggatcttccaggccggtgtggtgagctggggagacggctgcgctcagaggaacaagccaggcgtgtacacaaggctccctctgtttcgggactggatcaaagagaacactggggtataggggccggggccacccaaatgtgtacacctgcggggccacccatcgtccaccccagtgtgcacgcctgcaggctggagactggaccgctgactgcaccagcgcccccagaacatacactgtgaactcaatctccagggctccaaatctgcctagaaaacctctcgcttcctcagcctccaaagtggagctgggaggtagaaggggaggacactggtggttctactgacccaactgggggcaaaggtttgaagacacagcctcccccgccagccccaagctgggccgaggcgcgtttgtgtatatctgcctcccctgtctgtaaggagcagcgggaacggagcttcggagcctcctcagtgaaggtggtggggctgccggatctgggctgtggggcccttgggccacgctcttgaggaagcccaggctcggaggaccctggaaaacagacgggtctgagactgaaaatggtttaccagctcccaggtgacttcagtgtgtgtattgtgtaaatgagtaaaacattttatttctttttaaaaaaaaaaa

SEQ ID NO: 507 - DNA, 3149 bp, Homo sapiens
gacgcctgtgagacccgcgagcggcctcggggaccatggggagcgatcgggcccgcaagggcggagggggcccgaaggacttcggcgcgggactcaagtacaactcccggcacgagaaagtgaatggcttggaggaaggcgtggagttcctgccagtcaacaacgtcaagaaggtggaaaagcatggcccggggcgctgggtggtgctggcagccgtgctgatcggcctcctcttggtcttgctggggatcggcttcctggtgtggcatttgcagtaccgggacgtgcgtgtccagaaggtcttcaatggctacatgaggatcacaaatgagaattttgtggatgcctacgagaactccaactccactgagtttgtaagcctggccagcaaggtgaaggacgcgctgaagctgctgtacagcggagtcccattcctgggcccctaccacaaggagtcggctgtgacggccttcagcgagggcagcgtcatcgcctactactggtctgagttcagcatcccgcagcacctggtggaggaggccgagcgcgtcatggccgaggagcgcgtagtcatgctgcccccgcgggcgcgctccctgaagtcctttgtggtcacctcagtggtggctttccccacggactccaaaacagtacagaggacccaggacaacagctgcagctttggcctgcacgcccgcggtgtggagctgatgcgcttcaccacgcccggcttccctgacagcccctaccccgctcatgcccgctgccagtgggccctgcggggggacgccgactcagtgctgagcctcaccttccgcagctttgaccttgcgtcctgcgacgagcgcggcagcgacctggtgacggtgtacaacaccctgagccccatggagccccacgccctggtgcagttgtgtggcacctaccctccctcctacaacctgaccttccactcctcccagaacgtcctgctcatcacactgataaccaacactgagcggcggcatcccggctttgaggccaccttcttccagctgcctaggatgagcagctgtggaggccgcttacgtaaagcccaggggacattcaacagcccctactacccaggccactacccacccaacattgactgcacatggaacattgaggtgcccaacaaccagcatgtgaaggtgcgcttcaaattcttctacctgctggagcccggcgtgcctgcgggcacctgccccaaggactacgtggagatcaatggggagaaatactgcggagagaggtcccagttcgtcgtcaccagcaacagcaacaagatcacagttcgcttccactcagatcagtcctacaccgacaccggcttcttagctgaatacctctcctacgactccagtgacccatgcccggggcagttcacgtgccgcacggggcggtgtatccggaaggagctgcgctgtgatggctgggccgactgcaccgaccacagcgatgagctcaactgcagttgcgacgccggccaccagttcacgtgcaagaacaagttctgcaagcccctcttctgggtctgcgacagtgtgaacgactgcggagacaacagcgacgagcaggggtgcagttgtccggcccagaccttcaggtgttccaatgggaagtgcctctcgaaaagccagcagtgcaatgggaaggacgactgtggggacgggtccgacgaggcctcctgccccaaggtgaacgtcgtcacttgtaccaaacacacctaccgctgcctcaatgggctctgcttgagcaagggcaaccctgagtgtgacgggaaggaggactgtagcgacggctcagatgagaaggactgcgactgtgggctgcggtcattcacgagacaggctcgtgttgttgggggcacggatgcggatgagggcgagtggccctggcaggtaagcctgcatgctctgggccagggccacatctgcggtgcttccctcatctctcccaactggctggtctctgccgcacactgctacatcgatgacagaggattcaggtactcagaccccacgcagtggacggccttcctgggcttgcacgaccagagccagcgcagcgcccctggggtgcaggagcgcaggctcaagcgcatcatctcccaccccttcttcaatgacttcaccttcgactatgacatcgcgctgctggagctggagaaaccggcagagtacagctccatggtgcggcccatctgcctgccggacgcctcccatgtcttccctgccggcaaggccatctgggtcacgggctggggacacacccagtttggaggcactggcgcgctgatcctgcaaaagggtgagatccgcgtcatcaaccagaccacctgcgagaacctcctgccgcagcagatcacgccgcgcatgatgtgcgtgggcttcctcagcggcggcgtggactcctgccagggtgattccgggggacccctgtccagcgtggaggcggatgggcggatcttccaggccggtgtggtgagctggggagacggctgcgctcagaggaacaagccaggcgtgtacacaaggctccctctgtttcgggactggatcaaagagaacactggggtataggggccggggccacccaaatgtgtacacctgcggggccacccatcgtccaccccagtgtgcacgcctgcaggctggagactggaccgctgactgcaccagcgcccccagaacatacactgtgaactcaatctccagggctccaaatctgcctagaaaacctctcgcttcctcagcctccaaagtggagctgggaggtagaaggggaggacactggtggttctactgacccaactgggggcaaaggtttgaagacacagcctcccccgccagccccaagctgggccgaggcgcgtttgtgtatatctgcctcccctgtctgtaaggagcagcgggaacggagcttcggagcctcctcagtgaaggtggtggggctgccggatctgggctgtggggcccttgggccacgctcttgaggaagcccaggctcggaggaccctggaaaacagacgggtctgagactgaaaatggtttaccagctcccaggtgacttcagtgtgtgtattgtgtaaatgagtaaaacattttatttctttttaaaaaaaaaaa

SEQ ID NO: 508 - DNA, 3149 bp, Homo sapiens
gacgcctgtgagacccgcgagcggcctcggggaccatggggagcgatcgggcccgcaagggcggagggggcccgaaggacttcggcgcgggactcaagtacaactcccggcacgagaaagtgaatggcttggaggaaggcgtggagttcctgccagtcaacaacgtcaagaaggtggaaaagcatggcccggggcgctgggtggtgctggcagccgtgctgatcggcctcctcttggtcttgctggggatcggcttcctggtgtggcatttgcagtaccgggacgtgcgtgtccagaaggtcttcaatggctacatgaggatcacaaatgagaattttgtggatgcctacgagaactccaactccactgagtttgtaagcctggccagcaaggtgaaggacgcgctgaagctgctgtacagcggagtcccattcctgggcccctaccacaaggagtcggctgtgacggccttcagcgagggcagcgtcatcgcctactactggtctgagttcagcatcccgcagcacctggtggaggaggccgagcgcgtcatggccgaggagcgcgtagtcatgctgcccccgcgggcgcgctccctgaagtcctttgtggtcacctcagtggtggctttccccacggactccaaaacagtacagaggacccaggacaacagctgcagctttggcctgcacgcccgcggtgtggagctgatgcgcttcaccacgcccggcttccctgacagcccctaccccgctcatgcccgctgccagtgggccctgcggggggacgccgactcagtgctgagcctcaccttccgcagctttgaccttgcgtcctgcgacgagcgcggcagcgacctggtgacggtgtacaacaccctgagccccatggagccccacgccctggtgcagttgtgtggcacctaccctccctcctacaacctgaccttccactcctcccagaacgtcctgctcatcacactgataaccaacactgagcggcggcatcccggctttgaggccaccttcttccagctgcctaggatgagcagctgtggaggccgcttacgtaaagcccaggggacattcaacagcccctactacccaggccactacccacccaacattgactgcacatggaacattgaggtgcccaacaaccagcatgtgaaggtgcgcttcaaattcttctacctgctggagcccggcgtgcctgcgggcacctgccccaaggactacgtggagatcaatggggagaaatactgcggagagaggtcccagttcgtcgtcaccagcaacagcaacaagatcacagttcgcttccactcagatcagtcctacaccgacaccggcttcttagctgaatacctctcctacgactccagtgacccatgcccggggcagttcacgtgccgcacggggcggtgtatccggaaggagctgcgctgtgatggctgggccgactgcaccgaccacagcgatgagctcaactgcagttgcgacgccggccaccagttcacgtgcaagaacaagttctgcaagcccctcttctgggtctgcgacagtgtgaacgactgcggagacaacagcgacgagcaggggtgcagttgtccggcccagaccttcaggtgttccaatgggaagtgcctctcgaaaagccagcagtgcaatgggaaggacgactgtggggacgggtccgacgaggcctcctgccccaaggtgaacgtcgtcacttgtaccaaacacacctaccgctgcctcaatgggctctgcttgagcaagggcaaccctgagtgtgacgggaaggaggactgtagcgacggctcagatgagaaggactgcgactgtgggctgcggtcattcacgagacaggctcgtgttgttgggggcacggatgcggatgagggcgagtggccctggcaggtaagcctgcatgctctgggccagggccacatctgcggtgcttccctcatctctcccaactggctggtctctgccgcacactgctacatcgatgacagaggattcaggtactcagaccccacgcagtggacggccttcctgggcttgcacgaccagagccagcgcagcgcccctggggtgcaggagcgcaggctcaagcgcatcatctcccaccccttcttcaatgacttcaccgccgactatgacatcgcgctgctggagctggagaaaccggcagagtacagctccatggtgcggcccatctgcctgccggacgcctcccatgtcttccctgccggcaaggccatctgggtcacgggctggggacacacccagtatggaggcactggcgcgctgatcctgcaaaagggtgagatccgcgtcatcaaccagaccacctgcgagaacctcctgccgcagcagatcacgccgcgcatgatgtgcgtgggcttcctcagcggcggcgtggactcctgccagggtgattccgggggacccctgtccagcgtggaggcggatgggcggatcttccaggccggtgtggtgagctggggagacggctgcgctcagaggaacaagccaggcgtgtacacaaggctccctctgtttcgggactggatcaaagagaacactggggtataggggccggggccacccaaatgtgtacacctgcggggccacccatcgtccaccccagtgtgcacgcctgcaggctggagactggaccgctgactgcaccagcgcccccagaacatacactgtgaactcaatctccagggctccaaatctgcctagaaaacctctcgcttcctcagcctccaaagtggagctgggaggtagaaggggaggacactggtggttctactgacccaactgggggcaaaggtttgaagacacagcctcccccgccagccccaagctgggccgaggcgcgtttgtgtatatctgcctcccctgtctgtaaggagcagcgggaacggagcttcggagcctcctcagtgaaggtggtggggctgccggatctgggctgtggggcccttgggccacgctcttgaggaagcccaggctcggaggaccctggaaaacagacgggtctgagactgaaaatggtttaccagctcccaggtgacttcagtgtgtgtattgtgtaaatgagtaaaacattttatttctttttaaaaaaaaaaa

SEQ ID NO: 509 - DNA, 3149 bp, Homo sapiens
gacgcctgtgagacccgcgagcggcctcggggaccatggggagcgatcgggcccgcaagggcggagggggcccgaaggacttcggcgcgggactcaagtacaactcccggcacgagaaagtgaatggcttggaggaaggcgtggagttcctgccagtcaacaacgtcaagaaggtggaaaagcatggcccggggcgctgggtggtgctggcagccgtgctgatcggcctcctcttggtcttgctggggatcggcttcctggtgtggcatttgcagtaccgggacgtgcgtgtccagaaggtcttcaatggctacatgaggatcacaaatgagaattttgtggatgcctacgagaactccaactccactgagtttgtaagcctggccagcaaggtgaaggacgcgctgaagctgctgtacagcggagtcccattcctgggcccctaccacaaggagtcggctgtgacggccttcagcgagggcagcgtcatcgcctactactggtctgagttcagcatcccgcagcacctggtggaggaggccgagcgcgtcatggccgaggagcgcgtagtcatgctgcccccgcgggcgcgctccctgaagtcctttgtggtcacctcagtggtggctttccccacggactccaaaacagtacagaggacccaggacaacagctgcagctttggcctgcacgcccgcggtgtggagctgatgcgcttcaccacgcccggcttccctgacagcccctaccccgctcatgcccgctgccagtgggccctgcggggggacgccgactcagtgctgagcctcaccttccgcagctttgaccttgcgtcctgcgacgagcgcggcagcgacctggtgacggtgtacaacaccctgagccccatggagccccacgccctggtgcagttgtgtggcacctaccctccctcctacaacctgaccttccactcctcccagaacgtcctgctcatcacactgataaccaacactgagcggcggcatcccggctttgaggccaccttcttccagctgcctaggatgagcagctgtggaggccgcttacgtaaagcccaggggacattcaacagcccctactacccaggccactacccacccaacattgactgcacatggaacattgaggtgcccaacaaccagcatgtgaaggtgcgcttcaaattcttctacctgctggagcccggcgtgcctgcgggcacctgccccaaggactacgtggagatcaatggggagaaatactgcggagagaggtcccagttcgtcgtcaccagcaacagcaacaagatcacagttcgcttccactcagatcagtcctacaccgacaccggcttcttagctgaatacctctcctacgactccagtgacccatgcccggggcagttcacgtgccgcacggggcggtgtatccggaaggagctgcgctgtgatggctgggccgactgcaccgaccacagcgatgagctcaactgcagttgcgacgccggccaccagttcacgtgcaagaacaagttctgcaagcccctcttctgggtctgcgacagtgtgaacgactgcggagacaacagcgacgagcaggggtgcagttgtccggcccagaccttcaggtgttccaatgggaagtgcctctcgaaaagccagcagtgcaatgggaaggacgactgtggggacgggtccgacgaggcctcctgccccaaggtgaacgtcgtcacttgtaccaaacacacctaccgctgcctcaatgggctctgcttgagcaagggcaaccctgagtgtgacgggaaggaggactgtagcgacggctcagatgagaaggactgcgactgtgggctgcggtcattcacgagacaggctcgtgttgttgggggcacggatgcggatgagggcgagtggccctggcaggtaagcctgcatgctctgggccagggccacatctgcggtgcttccctcatctctcccaactggctggtctctgccgcacactgctacatcgatgacagaggattcaggtactcagaccccacgcagtggacggccttcctgggcttgcacgaccagagccagcgcagcgcccctggggtgcaggagcgcaggctcaagcgcatcatctcccaccccttcttcaatgacttcaccgtcgactatgacatcgcgctgctggagctggagaaaccggcagagtacagctccatggtgcggcccatctgcctgccggacgcctcccatgtcttccctgccggcaaggccatctgggtcacgggctggggacacacccagtatggaggcactggcgcgctgatcctgcaaaagggtgagatccgcgtcatcaaccagaccacctgcgagaacctcctgccgcagcagatcacgccgcgcatgatgtgcgtgggcttcctcagcggcggcgtggactcctgccagggtgattccgggggacccctgtccagcgtggaggcggatgggcggatcttccaggccggtgtggtgagctggggagacggctgcgctcagaggaacaagccaggcgtgtacacaaggctccctctgtttcgggactggatcaaagagaacactggggtataggggccggggccacccaaatgtgtacacctgcggggccacccatcgtccaccccagtgtgcacgcctgcaggctggagactggaccgctgactgcaccagcgcccccagaacatacactgtgaactcaatctccagggctccaaatctgcctagaaaacctctcgcttcctcagcctccaaagtggagctgggaggtagaaggggaggacactggtggttctactgacccaactgggggcaaaggtttgaagacacagcctcccccgccagccccaagctgggccgaggcgcgtttgtgtatatctgcctcccctgtctgtaaggagcagcgggaacggagcttcggagcctcctcagtgaaggtggtggggctgccggatctgggctgtggggcccttgggccacgctcttgaggaagcccaggctcggaggaccctggaaaacagacgggtctgagactgaaaatggtttaccagctcccaggtgacttcagtgtgtgtattgtgtaaatgagtaaaacattttatttctttttaaaaaaaaaaa

SEQ ID NO: 510 - DNA, 3149 bp, Homo Sapiens
gacgcctgtgagacccgcgagcggcctcggggaccatggggagcgatcgggcccgcaagggcggagggggcccgaaggacttcggcgcgggactcaagtacaactcccggcacgagaaagtgaatggcttggaggaaggcgtggagttcctgccagtcaacaacgtcaagaaggtggaaaagcatggcccggggcgctgggtggtgctggcagccgtgctgatcggcctcctcttggtcttgctggggatcggcttcctggtgtggcatttgcagtaccgggacgtgcgtgtccagaaggtcttcaatggctacatgaggatcacaaatgagaattttgtggatgcctacgagaactccaactccactgagtttgtaagcctggccagcaaggtgaaggacgcgctgaagctgctgtacagcggagtcccattcctgggcccctaccacaaggagtcggctgtgacggccttcagcgagggcagcgtcatcgcctactactggtctgagttcagcatcccgcagcacctggtggaggaggccgagcgcgtcatggccgaggagcgcgtagtcatgctgcccccgcgggcgcgctccctgaagtcctttgtggtcacctcagtggtggctttccccacggactccaaaacagtacagaggacccaggacaacagctgcagctttggcctgcacgcccgcggtgtggagctgatgcgcttcaccacgcccggcttccctgacagcccctaccccgctcatgcccgctgccagtgggccctgcggggggacgccgactcagtgctgagcctcaccttccgcagctttgaccttgcgtcctgcgacgagcgcggcagcgacctggtgacggtgtacaacaccctgagccccatggagccccacgccctggtgcagttgtgtggcacctaccctccctcctacaacctgaccttccactcctcccagaacgtcctgctcatcacactgataaccaacactgagcggcggcatcccggctttgaggccaccttcttccagctgcctaggatgagcagctgtggaggccgcttacgtaaagcccaggggacattcaacagcccctactacccaggccactacccacccaacattgactgcacatggaacattgaggtgcccaacaaccagcatgtgaaggtgcgcttcaaattcttctacctgctggagcccggcgtgcctgcgggcacctgccccaaggactacgtggagatcaatggggagaaatactgcggagagaggtcccagttcgtcgtcaccagcaacagcaacaagatcacagttcgcttccactcagatcagtcctacaccgacaccggcttcttagctgaatacctctcctacgactccagtgacccatgcccggggcagttcacgtgccgcacggggcggtgtatccggaaggagctgcgctgtgatggctgggccgactgcaccgaccacagcgatgagctcaactgcagttgcgacgccggccaccagttcacgtgcaagaacaagttctgcaagcccctcttctgggtctgcgacagtgtgaacgactgcggagacaacagcgacgagcaggggtgcagttgtccggcccagaccttcaggtgttccaatgggaagtgcctctcgaaaagccagcagtgcaatgggaaggacgactgtggggacgggtccgacgaggcctcctgccccaaggtgaacgtcgtcacttgtaccaaacacacctaccgctgcctcaatgggctctgcttgagcaagggcaaccctgagtgtgacgggaaggaggactgtagcgacggctcagatgagaaggactgcgactgtgggctgcggtcattcacgagacaggctcgtgttgttgggggcacggatgcggatgagggcgagtggccctggcaggtaagcctgcatgctctgggccagggccacatctgcggtgcttccctcatctctcccaactggctggtctctgccgcacactgctacatcgatgacagaggattcaggtactcagaccccacgcagtggacggccttcctgggcttgcacgaccagagccagcgcagcgcccctggggtgcaggagcgcaggctcaagcgcatcatctcccaccccttcttcaatgacttcacctcagactatgacatcgcgctgctggagctggagaaaccggcagagtacagctccatggtgcggcccatctgcctgccggacgcctcccatgtcttccctgccggcaaggccatctgggtcacgggctggggacacacccagtatggaggcactggcgcgctgatcctgcaaaagggtgagatccgcgtcatcaaccagaccacctgcgagaacctcctgccgcagcagatcacgccgcgcatgatgtgcgtgggcttcctcagcggcggcgtggactcctgccagggtgattccgggggacccctgtccagcgtggaggcggatgggcggatcttccaggccggtgtggtgagctggggagacggctgcgctcagaggaacaagccaggcgtgtacacaaggctccctctgtttcgggactggatcaaagagaacactggggtataggggccggggccacccaaatgtgtacacctgcggggccacccatcgtccaccccagtgtgcacgcctgcaggctggagactggaccgctgactgcaccagcgcccccagaacatacactgtgaactcaatctccagggctccaaatctgcctagaaaacctctcgcttcctcagcctccaaagtggagctgggaggtagaaggggaggacactggtggttctactgacccaactgggggcaaaggtttgaagacacagcctcccccgccagccccaagctgggccgaggcgcgtttgtgtatatctgcctcccctgtctgtaaggagcagcgggaacggagcttcggagcctcctcagtgaaggtggtggggctgccggatctgggctgtggggcccttgggccacgctcttgaggaagcccaggctcggaggaccctggaaaacagacgggtctgagactgaaaatggtttaccagctcccaggtgacttcagtgtgtgtattgtgtaaatgagtaaaacattttatttctttttaaaaaaaaaaa

SEQ ID NO: 511 - DNA, 3149 bp, Homo sapiens
gacgcctgtgagacccgcgagcggcctcggggaccatggggagcgatcgggcccgcaagggcggagggggcccgaaggacttcggcgcgggactcaagtacaactcccggcacgagaaagtgaatggcttggaggaaggcgtggagttcctgccagtcaacaacgtcaagaaggtggaaaagcatggcccggggcgctgggtggtgctggcagccgtgctgatcggcctcctcttggtcttgctggggatcggcttcctggtgtggcatttgcagtaccgggacgtgcgtgtccagaaggtcttcaatggctacatgaggatcacaaatgagaattttgtggatgcctacgagaactccaactccactgagtttgtaagcctggccagcaaggtgaaggacgcgctgaagctgctgtacagcggagtcccattcctgggcccctaccacaaggagtcggctgtgacggccttcagcgagggcagcgtcatcgcctactactggtctgagttcagcatcccgcagcacctggtggaggaggccgagcgcgtcatggccgaggagcgcgtagtcatgctgcccccgcgggcgcgctccctgaagtcctttgtggtcacctcagtggtggctttccccacggactccaaaacagtacagaggacccaggacaacagctgcagctttggcctgcacgcccgcggtgtggagctgatgcgcttcaccacgcccggcttccctgacagcccctaccccgctcatgcccgctgccagtgggccctgcggggggacgccgactcagtgctgagcctcaccttccgcagctttgaccttgcgtcctgcgacgagcgcggcagcgacctggtgacggtgtacaacaccctgagccccatggagccccacgccctggtgcagttgtgtggcacctaccctccctcctacaacctgaccttccactcctcccagaacgtcctgctcatcacactgataaccaacactgagcggcggcatcccggctttgaggccaccttcttccagctgcctaggatgagcagctgtggaggccgcttacgtaaagcccaggggacattcaacagcccctactacccaggccactacccacccaacattgactgcacatggaacattgaggtgcccaacaaccagcatgtgaaggtgcgcttcaaattcttctacctgctggagcccggcgtgcctgcgggcacctgccccaaggactacgtggagatcaatggggagaaatactgcggagagaggtcccagttcgtcgtcaccagcaacagcaacaagatcacagttcgcttccactcagatcagtcctacaccgacaccggcttcttagctgaatacctctcctacgactccagtgacccatgcccggggcagttcacgtgccgcacggggcggtgtatccggaaggagctgcgctgtgatggctgggccgactgcaccgaccacagcgatgagctcaactgcagttgcgacgccggccaccagttcacgtgcaagaacaagttctgcaagcccctcttctgggtctgcgacagtgtgaacgactgcggagacaacagcgacgagcaggggtgcagttgtccggcccagaccttcaggtgttccaatgggaagtgcctctcgaaaagccagcagtgcaatgggaaggacgactgtggggacgggtccgacgaggcctcctgccccaaggtgaacgtcgtcacttgtaccaaacacacctaccgctgcctcaatgggctctgcttgagcaagggcaaccctgagtgtgacgggaaggaggactgtagcgacggctcagatgagaaggactgcgactgtgggctgcggtcattcacgagacaggctcgtgttgttgggggcacggatgcggatgagggcgagtggccctggcaggtaagcctgcatgctctgggccagggccacatctgcggtgcttccctcatctctcccaactggctggtctctgccgcacactgctacatcgatgacagaggattcaggtactcagaccccacgcagtggacggccttcctgggcttgcacgaccagagccagcgcagcgcccctggggtgcaggagcgcaggctcaagcgcatcatctcccaccccttcttcaatgacttcaccggcgactatgacatcgcgctgctggagctggagaaaccggcagagtacagctccatggtgcggcccatctgcctgccggacgcctcccatgtcttccctgccggcaaggccatctgggtcacgggctggggacacacccagtatggaggcactggcgcgctgatcctgcaaaagggtgagatccgcgtcatcaaccagaccacctgcgagaacctcctgccgcagcagatcacgccgcgcatgatgtgcgtgggcttcctcagcggcggcgtggactcctgccagggtgattccgggggacccctgtccagcgtggaggcggatgggcggatcttccaggccggtgtggtgagctggggagacggctgcgctcagaggaacaagccaggcgtgtacacaaggctccctctgtttcgggactggatcaaagagaacactggggtataggggccggggccacccaaatgtgtacacctgcggggccacccatcgtccaccccagtgtgcacgcctgcaggctggagactggaccgctgactgcaccagcgcccccagaacatacactgtgaactcaatctccagggctccaaatctgcctagaaaacctctcgcttcctcagcctccaaagtggagctgggaggtagaaggggaggacactggtggttctactgacccaactgggggcaaaggtttgaagacacagcctcccccgccagccccaagctgggccgaggcgcgtttgtgtatatctgcctcccctgtctgtaaggagcagcgggaacggagcttcggagcctcctcagtgaaggtggtggggctgccggatctgggctgtggggcccttgggccacgctcttgaggaagcccaggctcggaggaccctggaaaacagacgggtctgagactgaaaatggtttaccagctcccaggtgacttcagtgtgtgtattgtgtaaatgagtaaaacattttatttctttttaaaaaaaaaaa

SEQ ID NO: 512 - DNA, 3149 bp, Homo sapiens
gacgcctgtgagacccgcgagcggcctcggggaccatggggagcgatcgggcccgcaagggcggagggggcccgaaggacttcggcgcgggactcaagtacaactcccggcacgagaaagtgaatggcttggaggaaggcgtggagttcctgccagtcaacaacgtcaagaaggtggaaaagcatggcccggggcgctgggtggtgctggcagccgtgctgatcggcctcctcttggtcttgctggggatcggcttcctggtgtggcatttgcagtaccgggacgtgcgtgtccagaaggtcttcaatggctacatgaggatcacaaatgagaattttgtggatgcctacgagaactccaactccactgagtttgtaagcctggccagcaaggtgaaggacgcgctgaagctgctgtacagcggagtcccattcctgggcccctaccacaaggagtcggctgtgacggccttcagcgagggcagcgtcatcgcctactactggtctgagttcagcatcccgcagcacctggtggaggaggccgagcgcgtcatggccgaggagcgcgtagtcatgctgcccccgcgggcgcgctccctgaagtcctttgtggtcacctcagtggtggctttccccacggactccaaaacagtacagaggacccaggacaacagctgcagctttggcctgcacgcccgcggtgtggagctgatgcgcttcaccacgcccggcttccctgacagcccctaccccgctcatgcccgctgccagtgggccctgcggggggacgccgactcagtgctgagcctcaccttccgcagctttgaccttgcgtcctgcgacgagcgcggcagcgacctggtgacggtgtacaacaccctgagccccatggagccccacgccctggtgcagttgtgtggcacctaccctccctcctacaacctgaccttccactcctcccagaacgtcctgctcatcacactgataaccaacactgagcggcggcatcccggctttgaggccaccttcttccagctgcctaggatgagcagctgtggaggccgcttacgtaaagcccaggggacattcaacagcccctactacccaggccactacccacccaacattgactgcacatggaacattgaggtgcccaacaaccagcatgtgaaggtgcgcttcaaattcttctacctgctggagcccggcgtgcctgcgggcacctgccccaaggactacgtggagatcaatggggagaaatactgcggagagaggtcccagttcgtcgtcaccagcaacagcaacaagatcacagttcgcttccactcagatcagtcctacaccgacaccggcttcttagctgaatacctctcctacgactccagtgacccatgcccggggcagttcacgtgccgcacggggcggtgtatccggaaggagctgcgctgtgatggctgggccgactgcaccgaccacagcgatgagctcaactgcagttgcgacgccggccaccagttcacgtgcaagaacaagttctgcaagcccctcttctgggtctgcgacagtgtgaacgactgcggagacaacagcgacgagcaggggtgcagttgtccggcccagaccttcaggtgttccaatgggaagtgcctctcgaaaagccagcagtgcaatgggaaggacgactgtggggacgggtccgacgaggcctcctgccccaaggtgaacgtcgtcacttgtaccaaacacacctaccgctgcctcaatgggctctgcttgagcaagggcaaccctgagtgtgacgggaaggaggactgtagcgacggctcagatgagaaggactgcgactgtgggctgcggtcattcacgagacaggctcgtgttgttgggggcacggatgcggatgagggcgagtggccctggcaggtaagcctgcatgctctgggccagggccacatctgcggtgcttccctcatctctcccaactggctggtctctgccgcacactgctacatcgatgacagaggattcaggtactcagaccccacgcagtggacggccttcctgggcttgcacgaccagagccagcgcagcgcccctggggtgcaggagcgcaggctcaagcgcatcatctcccaccccttcttcaatgacttcaccttcgactatgacatcgcgctgctggagctggagaaaccggcagagtacagctccatggtgcggcccatctgcctgccggacgcctcccatgtcttccctgccggcaaggccatctgggtcacgggctggggacacacccagtatggaggcactggcgcgctgatcctgcaaaagggtgagatccgcgtcatcaaccagaccacctgcgagaacctcctgccgcagcagatcacgccgcgcatgatgtgcgtgggcttcctcagcggcggcgtggactcctgccagggtgattccgggggacccctgtccagcgtggaggcggatgggcggatcttccaggccggtgtggtgagcttcggagacggctgcgctcagaggaacaagccaggcgtgtacacaaggctccctctgtttcgggactggatcaaagagaacactggggtataggggccggggccacccaaatgtgtacacctgcggggccacccatcgtccaccccagtgtgcacgcctgcaggctggagactggaccgctgactgcaccagcgcccccagaacatacactgtgaactcaatctccagggctccaaatctgcctagaaaacctctcgcttcctcagcctccaaagtggagctgggaggtagaaggggaggacactggtggttctactgacccaactgggggcaaaggtttgaagacacagcctcccccgccagccccaagctgggccgaggcgcgtttgtgtatatctgcctcccctgtctgtaaggagcagcgggaacggagcttcggagcctcctcagtgaaggtggtggggctgccggatctgggctgtggggcccttgggccacgctcttgaggaagcccaggctcggaggaccctggaaaacagacgggtctgagactgaaaatggtttaccagctcccaggtgacttcagtgtgtgtattgtgtaaatgagtaaaacattttatttctttttaaaaaaaaaaa

SEQ ID NO: 513 - DNA, 3149 bp, Homo sapiens
gacgcctgtgagacccgcgagcggcctcggggaccatggggagcgatcgggcccgcaagggcggagggggcccgaaggacttcggcgcgggactcaagtacaactcccggcacgagaaagtgaatggcttggaggaaggcgtggagttcctgccagtcaacaacgtcaagaaggtggaaaagcatggcccggggcgctgggtggtgctggcagccgtgctgatcggcctcctcttggtcttgctggggatcggcttcctggtgtggcatttgcagtaccgggacgtgcgtgtccagaaggtcttcaatggctacatgaggatcacaaatgagaattttgtggatgcctacgagaactccaactccactgagtttgtaagcctggccagcaaggtgaaggacgcgctgaagctgctgtacagcggagtcccattcctgggcccctaccacaaggagtcggctgtgacggccttcagcgagggcagcgtcatcgcctactactggtctgagttcagcatcccgcagcacctggtggaggaggccgagcgcgtcatggccgaggagcgcgtagtcatgctgcccccgcgggcgcgctccctgaagtcctttgtggtcacctcagtggtggctttccccacggactccaaaacagtacagaggacccaggacaacagctgcagctttggcctgcacgcccgcggtgtggagctgatgcgcttcaccacgcccggcttccctgacagcccctaccccgctcatgcccgctgccagtgggccctgcggggggacgccgactcagtgctgagcctcaccttccgcagctttgaccttgcgtcctgcgacgagcgcggcagcgacctggtgacggtgtacaacaccctgagccccatggagccccacgccctggtgcagttgtgtggcacctaccctccctcctacaacctgaccttccactcctcccagaacgtcctgctcatcacactgataaccaacactgagcggcggcatcccggctttgaggccaccttcttccagctgcctaggatgagcagctgtggaggccgcttacgtaaagcccaggggacattcaacagcccctactacccaggccactacccacccaacattgactgcacatggaacattgaggtgcccaacaaccagcatgtgaaggtgcgcttcaaattcttctacctgctggagcccggcgtgcctgcgggcacctgccccaaggactacgtggagatcaatggggagaaatactgcggagagaggtcccagttcgtcgtcaccagcaacagcaacaagatcacagttcgcttccactcagatcagtcctacaccgacaccggcttcttagctgaatacctctcctacgactccagtgacccatgcccggggcagttcacgtgccgcacggggcggtgtatccggaaggagctgcgctgtgatggctgggccgactgcaccgaccacagcgatgagctcaactgcagttgcgacgccggccaccagttcacgtgcaagaacaagttctgcaagcccctcttctgggtctgcgacagtgtgaacgactgcggagacaacagcgacgagcaggggtgcagttgtccggcccagaccttcaggtgttccaatgggaagtgcctctcgaaaagccagcagtgcaatgggaaggacgactgtggggacgggtccgacgaggcctcctgccccaaggtgaacgtcgtcacttgtaccaaacacacctaccgctgcctcaatgggctctgcttgagcaagggcaaccctgagtgtgacgggaaggaggactgtagcgacggctcagatgagaaggactgcgactgtgggctgcggtcattcacgagacaggctcgtgttgttgggggcacggatgcggatgagggcgagtggccctggcaggtaagcctgcatgctctgggccagggccacatctgcggtgcttccctcatctctcccaactggctggtctctgccgcacactgctacatcgatgacagaggattcaggtactcagaccccacgcagtggacggccttcctgggcttgcacgaccagagccagcgcagcgcccctggggtgcaggagcgcaggctcaagcgcatcatctcccaccccttcttcaatgacttcaccttcgactatgacatcgcgctgctggagctggagaaaccggcagagtacagctccatggtgcggcccatctgcctgccggacgcctcccatgtcttccctgccggcaaggccatctgggtcacgggctggggacacacccagtatggaggcactggcgcgctgatcctgcaaaagggtgagatccgcgtcatcaaccagaccacctgcgagaacctcctgccgcagcagatcacgccgcgcatgatgtgcgtgggcttcctcagcggcggcgtggactcctgccagggtgattccgggggacccctgtccagcgtggaggcggatgggcggatcttccaggccggtgtggtgagctacggagacggctgcgctcagaggaacaagccaggcgtgtacacaaggctccctctgtttcgggactggatcaaagagaacactggggtataggggccggggccacccaaatgtgtacacctgcggggccacccatcgtccaccccagtgtgcacgcctgcaggctggagactggaccgctgactgcaccagcgcccccagaacatacactgtgaactcaatctccagggctccaaatctgcctagaaaacctctcgcttcctcagcctccaaagtggagctgggaggtagaaggggaggacactggtggttctactgacccaactgggggcaaaggtttgaagacacagcctcccccgccagccccaagctgggccgaggcgcgtttgtgtatatctgcctcccctgtctgtaaggagcagcgggaacggagcttcggagcctcctcagtgaaggtggtggggctgccggatctgggctgtggggcccttgggccacgctcttgaggaagcccaggctcggaggaccctggaaaacagacgggtctgagactgaaaatggtttaccagctcccaggtgacttcagtgtgtgtattgtgtaaatgagtaaaacattttatttctttttaaaaaaaaaaa

SEQ ID NO: 514 - DNA, 3149 bp, Homo sapiens
gacgcctgtgagacccgcgagcggcctcggggaccatggggagcgatcgggcccgcaagggcggagggggcccgaaggacttcggcgcgggactcaagtacaactcccggcacgagaaagtgaatggcttggaggaaggcgtggagttcctgccagtcaacaacgtcaagaaggtggaaaagcatggcccggggcgctgggtggtgctggcagccgtgctgatcggcctcctcttggtcttgctggggatcggcttcctggtgtggcatttgcagtaccgggacgtgcgtgtccagaaggtcttcaatggctacatgaggatcacaaatgagaattttgtggatgcctacgagaactccaactccactgagtttgtaagcctggccagcaaggtgaaggacgcgctgaagctgctgtacagcggagtcccattcctgggcccctaccacaaggagtcggctgtgacggccttcagcgagggcagcgtcatcgcctactactggtctgagttcagcatcccgcagcacctggtggaggaggccgagcgcgtcatggccgaggagcgcgtagtcatgctgcccccgcgggcgcgctccctgaagtcctttgtggtcacctcagtggtggctttccccacggactccaaaacagtacagaggacccaggacaacagctgcagctttggcctgcacgcccgcggtgtggagctgatgcgcttcaccacgcccggcttccctgacagcccctaccccgctcatgcccgctgccagtgggccctgcggggggacgccgactcagtgctgagcctcaccttccgcagctttgaccttgcgtcctgcgacgagcgcggcagcgacctggtgacggtgtacaacaccctgagccccatggagccccacgccctggtgcagttgtgtggcacctaccctccctcctacaacctgaccttccactcctcccagaacgtcctgctcatcacactgataaccaacactgagcggcggcatcccggctttgaggccaccttcttccagctgcctaggatgagcagctgtggaggccgcttacgtaaagcccaggggacattcaacagcccctactacccaggccactacccacccaacattgactgcacatggaacattgaggtgcccaacaaccagcatgtgaaggtgcgcttcaaattcttctacctgctggagcccggcgtgcctgcgggcacctgccccaaggactacgtggagatcaatggggagaaatactgcggagagaggtcccagttcgtcgtcaccagcaacagcaacaagatcacagttcgcttccactcagatcagtcctacaccgacaccggcttcttagctgaatacctctcctacgactccagtgacccatgcccggggcagttcacgtgccgcacggggcggtgtatccggaaggagctgcgctgtgatggctgggccgactgcaccgaccacagcgatgagctcaactgcagttgcgacgccggccaccagttcacgtgcaagaacaagttctgcaagcccctcttctgggtctgcgacagtgtgaacgactgcggagacaacagcgacgagcaggggtgcagttgtccggcccagaccttcaggtgttccaatgggaagtgcctctcgaaaagccagcagtgcaatgggaaggacgactgtggggacgggtccgacgaggcctcctgccccaaggtgaacgtcgtcacttgtaccaaacacacctaccgctgcctcaatgggctctgcttgagcaagggcaaccctgagtgtgacgggaaggaggactgtagcgacggctcagatgagaaggactgcgactgtgggctgcggtcattcacgagacaggctcgtgttgttgggggcacggatgcggatgagggcgagtggccctggcaggtaagcctgcatgctctgggccagggccacatctgcggtgcttccctcatctctcccaactggctggtctctgccgcacactgctacatcgatgacagaggattcaggtactcagaccccacgcagtggacggccttcctgggcttgcacgaccagagccagcgcagcgcccctggggtgcaggagcgcaggctcaagcgcatcatctcccaccccttcttcaatgacttcaccttcgactatgacatcgcgctgctggagctggagaaaccggcagagtacagctccatggtgcggcccatctgcctgccggacgcctcccatgtcttccctgccggcaaggccatctgggtcacgggctggggacacacccagtatggaggcactggcgcgctgatcctgcaaaagggtgagatccgcgtcatcaaccagaccacctgcgagaacctcctgccggcgcagatcacgccgcgcatgatgtgcgtgggcttcctcagcggcggcgtggactcctgccagggtgattccgggggacccctgtccagcgtggaggcggatgggcggatcttccaggccggtgtggtgagctggggagacggctgcgctcagaggaacaagccaggcgtgtacacaaggctccctctgtttcgggactggatcaaagagaacactggggtataggggccggggccacccaaatgtgtacacctgcggggccacccatcgtccaccccagtgtgcacgcctgcaggctggagactggaccgctgactgcaccagcgcccccagaacatacactgtgaactcaatctccagggctccaaatctgcctagaaaacctctcgcttcctcagcctccaaagtggagctgggaggtagaaggggaggacactggtggttctactgacccaactgggggcaaaggtttgaagacacagcctcccccgccagccccaagctgggccgaggcgcgtttgtgtatatctgcctcccctgtctgtaaggagcagcgggaacggagcttcggagcctcctcagtgaaggtggtggggctgccggatctgggctgtggggcccttgggccacgctcttgaggaagcccaggctcggaggaccctggaaaacagacgggtctgagactgaaaatggtttaccagctcccaggtgacttcagtgtgtgtattgtgtaaatgagtaaaacattttatttctttttaaaaaaaaaaa

SEQ ID NO: 515 - DNA, 3149 bp, Homo sapiens
gacgcctgtgagacccgcgagcggcctcggggaccatggggagcgatcgggcccgcaagggcggagggggcccgaaggacttcggcgcgggactcaagtacaactcccggcacgagaaagtgaatggcttggaggaaggcgtggagttcctgccagtcaacaacgtcaagaaggtggaaaagcatggcccggggcgctgggtggtgctggcagccgtgctgatcggcctcctcttggtcttgctggggatcggcttcctggtgtggcatttgcagtaccgggacgtgcgtgtccagaaggtcttcaatggctacatgaggatcacaaatgagaattttgtggatgcctacgagaactccaactccactgagtttgtaagcctggccagcaaggtgaaggacgcgctgaagctgctgtacagcggagtcccattcctgggcccctaccacaaggagtcggctgtgacggccttcagcgagggcagcgtcatcgcctactactggtctgagttcagcatcccgcagcacctggtggaggaggccgagcgcgtcatggccgaggagcgcgtagtcatgctgcccccgcgggcgcgctccctgaagtcctttgtggtcacctcagtggtggctttccccacggactccaaaacagtacagaggacccaggacaacagctgcagctttggcctgcacgcccgcggtgtggagctgatgcgcttcaccacgcccggcttccctgacagcccctaccccgctcatgcccgctgccagtgggccctgcggggggacgccgactcagtgctgagcctcaccttccgcagctttgaccttgcgtcctgcgacgagcgcggcagcgacctggtgacggtgtacaacaccctgagccccatggagccccacgccctggtgcagttgtgtggcacctaccctccctcctacaacctgaccttccactcctcccagaacgtcctgctcatcacactgataaccaacactgagcggcggcatcccggctttgaggccaccttcttccagctgcctaggatgagcagctgtggaggccgcttacgtaaagcccaggggacattcaacagcccctactacccaggccactacccacccaacattgactgcacatggaacattgaggtgcccaacaaccagcatgtgaaggtgcgcttcaaattcttctacctgctggagcccggcgtgcctgcgggcacctgccccaaggactacgtggagatcaatggggagaaatactgcggagagaggtcccagttcgtcgtcaccagcaacagcaacaagatcacagttcgcttccactcagatcagtcctacaccgacaccggcttcttagctgaatacctctcctacgactccagtgacccatgcccggggcagttcacgtgccgcacggggcggtgtatccggaaggagctgcgctgtgatggctgggccgactgcaccgaccacagcgatgagctcaactgcagttgcgacgccggccaccagttcacgtgcaagaacaagttctgcaagcccctcttctgggtctgcgacagtgtgaacgactgcggagacaacagcgacgagcaggggtgcagttgtccggcccagaccttcaggtgttccaatgggaagtgcctctcgaaaagccagcagtgcaatgggaaggacgactgtggggacgggtccgacgaggcctcctgccccaaggtgaacgtcgtcacttgtaccaaacacacctaccgctgcctcaatgggctctgcttgagcaagggcaaccctgagtgtgacgggaaggaggactgtagcgacggctcagatgagaaggactgcgactgtgggctgcggtcattcacgagacaggctcgtgttgttgggggcacggatgcggatgagggcgagtggccctggcaggtaagcctgcatgctctgggccagggccacatctgcggtgcttccctcatctctcccaactggctggtctctgccgcacactgctacatcgatgacagaggattcaggtactcagaccccacgcagtggacggccttcctgggcttgcacgaccagagccagcgcagcgcccctggggtgcaggagcgcaggctcaagcgcatcatctcccaccccttcttcaatgacttcaccttcgactatgacatcgcgctgctggagctggagaaaccggcagagtacagctccatggtgcggcccatctgcctgccggacgcctcccatgtcttccctgccggcaaggccatctgggtcacgggctggggacacacccagtatggaggcactggcgcgctgatcctgcaaaagggtgagatccgcgtcatcaaccagaccacctgcgagaacctcctgccggtgcagatcacgccgcgcatgatgtgcgtgggcttcctcagcggcggcgtggactcctgccagggtgattccgggggacccctgtccagcgtggaggcggatgggcggatcttccaggccggtgtggtgagctggggagacggctgcgctcagaggaacaagccaggcgtgtacacaaggctccctctgtttcgggactggatcaaagagaacactggggtataggggccggggccacccaaatgtgtacacctgcggggccacccatcgtccaccccagtgtgcacgcctgcaggctggagactggaccgctgactgcaccagcgcccccagaacatacactgtgaactcaatctccagggctccaaatctgcctagaaaacctctcgcttcctcagcctccaaagtggagctgggaggtagaaggggaggacactggtggttctactgacccaactgggggcaaaggtttgaagacacagcctcccccgccagccccaagctgggccgaggcgcgtttgtgtatatctgcctcccctgtctgtaaggagcagcgggaacggagcttcggagcctcctcagtgaaggtggtggggctgccggatctgggctgtggggcccttgggccacgctcttgaggaagcccaggctcggaggaccctggaaaacagacgggtctgagactgaaaatggtttaccagctcccaggtgacttcagtgtgtgtattgtgtaaatgagtaaaacattttatttctttttaaaaaaaaaaa

SEQ ID NO: 516 - DNA, 3149 bp, Homo sapiens
gacgcctgtgagacccgcgagcggcctcggggaccatggggagcgatcgggcccgcaagggcggagggggcccgaaggacttcggcgcgggactcaagtacaactcccggcacgagaaagtgaatggcttggaggaaggcgtggagttcctgccagtcaacaacgtcaagaaggtggaaaagcatggcccggggcgctgggtggtgctggcagccgtgctgatcggcctcctcttggtcttgctggggatcggcttcctggtgtggcatttgcagtaccgggacgtgcgtgtccagaaggtcttcaatggctacatgaggatcacaaatgagaattttgtggatgcctacgagaactccaactccactgagtttgtaagcctggccagcaaggtgaaggacgcgctgaagctgctgtacagcggagtcccattcctgggcccctaccacaaggagtcggctgtgacggccttcagcgagggcagcgtcatcgcctactactggtctgagttcagcatcccgcagcacctggtggaggaggccgagcgcgtcatggccgaggagcgcgtagtcatgctgcccccgcgggcgcgctccctgaagtcctttgtggtcacctcagtggtggctttccccacggactccaaaacagtacagaggacccaggacaacagctgcagctttggcctgcacgcccgcggtgtggagctgatgcgcttcaccacgcccggcttccctgacagcccctaccccgctcatgcccgctgccagtgggccctgcggggggacgccgactcagtgctgagcctcaccttccgcagctttgaccttgcgtcctgcgacgagcgcggcagcgacctggtgacggtgtacaacaccctgagccccatggagccccacgccctggtgcagttgtgtggcacctaccctccctcctacaacctgaccttccactcctcccagaacgtcctgctcatcacactgataaccaacactgagcggcggcatcccggctttgaggccaccttcttccagctgcctaggatgagcagctgtggaggccgcttacgtaaagcccaggggacattcaacagcccctactacccaggccactacccacccaacattgactgcacatggaacattgaggtgcccaacaaccagcatgtgaaggtgcgcttcaaattcttctacctgctggagcccggcgtgcctgcgggcacctgccccaaggactacgtggagatcaatggggagaaatactgcggagagaggtcccagttcgtcgtcaccagcaacagcaacaagatcacagttcgcttccactcagatcagtcctacaccgacaccggcttcttagctgaatacctctcctacgactccagtgacccatgcccggggcagttcacgtgccgcacggggcggtgtatccggaaggagctgcgctgtgatggctgggccgactgcaccgaccacagcgatgagctcaactgcagttgcgacgccggccaccagttcacgtgcaagaacaagttctgcaagcccctcttctgggtctgcgacagtgtgaacgactgcggagacaacagcgacgagcaggggtgcagttgtccggcccagaccttcaggtgttccaatgggaagtgcctctcgaaaagccagcagtgcaatgggaaggacgactgtggggacgggtccgacgaggcctcctgccccaaggtgaacgtcgtcacttgtaccaaacacacctaccgctgcctcaatgggctctgcttgagcaagggcaaccctgagtgtgacgggaaggaggactgtagcgacggctcagatgagaaggactgcgactgtgggctgcggtcattcacgagacaggctcgtgttgttgggggcacggatgcggatgagggcgagtggccctggcaggtaagcctgcatgctctgggccagggccacatctgcggtgcttccctcatctctcccaactggctggtctctgccgcacactgctacatcgatgacagaggattcaggtactcagaccccacgcagtggacggccttcctgggcttgcacgaccagagccagcgcagcgcccctggggtgcaggagcgcaggctcaagcgcatcatctcccaccccttcttcaatgacttcaccttcgactatgacatcgcgctgctggagctggagaaaccggcagagtacagctccatggtgcggcccatctgcctgccggacgcctcccatgtcttccctgccggcaaggccatctgggtcacgggctggggacacacccagtatggaggcactggcgcgctgatcctgcaaaagggtgagatccgcgtcatcaaccagaccacctgcgagaacctcctgccgttccagatcacgccgcgcatgatgtgcgtgggcttcctcagcggcggcgtggactcctgccagggtgattccgggggacccctgtccagcgtggaggcggatgggcggatcttccaggccggtgtggtgagctggggagacggctgcgctcagaggaacaagccaggcgtgtacacaaggctccctctgtttcgggactggatcaaagagaacactggggtataggggccggggccacccaaatgtgtacacctgcggggccacccatcgtccaccccagtgtgcacgcctgcaggctggagactggaccgctgactgcaccagcgcccccagaacatacactgtgaactcaatctccagggctccaaatctgcctagaaaacctctcgcttcctcagcctccaaagtggagctgggaggtagaaggggaggacactggtggttctactgacccaactgggggcaaaggtttgaagacacagcctcccccgccagccccaagctgggccgaggcgcgtttgtgtatatctgcctcccctgtctgtaaggagcagcgggaacggagcttcggagcctcctcagtgaaggtggtggggctgccggatctgggctgtggggcccttgggccacgctcttgaggaagcccaggctcggaggaccctggaaaacagacgggtctgagactgaaaatggtttaccagctcccaggtgacttcagtgtgtgtattgtgtaaatgagtaaaacattttatttctttttaaaaaaaaaaa

SEQ ID NO: 517 - DNA, 3149 bp, Homo sapiens
gacgcctgtgagacccgcgagcggcctcggggaccatggggagcgatcgggcccgcaagggcggagggggcccgaaggacttcggcgcgggactcaagtacaactcccggcacgagaaagtgaatggcttggaggaaggcgtggagttcctgccagtcaacaacgtcaagaaggtggaaaagcatggcccggggcgctgggtggtgctggcagccgtgctgatcggcctcctcttggtcttgctggggatcggcttcctggtgtggcatttgcagtaccgggacgtgcgtgtccagaaggtcttcaatggctacatgaggatcacaaatgagaattttgtggatgcctacgagaactccaactccactgagtttgtaagcctggccagcaaggtgaaggacgcgctgaagctgctgtacagcggagtcccattcctgggcccctaccacaaggagtcggctgtgacggccttcagcgagggcagcgtcatcgcctactactggtctgagttcagcatcccgcagcacctggtggaggaggccgagcgcgtcatggccgaggagcgcgtagtcatgctgcccccgcgggcgcgctccctgaagtcctttgtggtcacctcagtggtggctttccccacggactccaaaacagtacagaggacccaggacaacagctgcagctttggcctgcacgcccgcggtgtggagctgatgcgcttcaccacgcccggcttccctgacagcccctaccccgctcatgcccgctgccagtgggccctgcggggggacgccgactcagtgctgagcctcaccttccgcagctttgaccttgcgtcctgcgacgagcgcggcagcgacctggtgacggtgtacaacaccctgagccccatggagccccacgccctggtgcagttgtgtggcacctaccctccctcctacaacctgaccttccactcctcccagaacgtcctgctcatcacactgataaccaacactgagcggcggcatcccggctttgaggccaccttcttccagctgcctaggatgagcagctgtggaggccgcttacgtaaagcccaggggacattcaacagcccctactacccaggccactacccacccaacattgactgcacatggaacattgaggtgcccaacaaccagcatgtgaaggtgcgcttcaaattcttctacctgctggagcccggcgtgcctgcgggcacctgccccaaggactacgtggagatcaatggggagaaatactgcggagagaggtcccagttcgtcgtcaccagcaacagcaacaagatcacagttcgcttccactcagatcagtcctacaccgacaccggcttcttagctgaatacctctcctacgactccagtgacccatgcccggggcagttcacgtgccgcacggggcggtgtatccggaaggagctgcgctgtgatggctgggccgactgcaccgaccacagcgatgagctcaactgcagttgcgacgccggccaccagttcacgtgcaagaacaagttctgcaagcccctcttctgggtctgcgacagtgtgaacgactgcggagacaacagcgacgagcaggggtgcagttgtccggcccagaccttcaggtgttccaatgggaagtgcctctcgaaaagccagcagtgcaatgggaaggacgactgtggggacgggtccgacgaggcctcctgccccaaggtgaacgtcgtcacttgtaccaaacacacctaccgctgcctcaatgggctctgcttgagcaagggcaaccctgagtgtgacgggaaggaggactgtagcgacggctcagatgagaaggactgcgactgtgggctgcggtcattcacgagacaggctcgtgttgttgggggcacggatgcggatgagggcgagtggccctggcaggtaagcctgcatgctctgggccagggccacatctgcggtgcttccctcatctctcccaactggctggtctctgccgcacactgctacatcgatgacagaggattcaggtactcagaccccacgcagtggacggccttcctgggcttgcacgaccagagccagcgcagcgcccctggggtgcaggagcgcaggctcaagcgcatcatctcccaccccttcttcaatgacttcaccttcgactatgacatcgcgctgctggagctggagaaaccggcagagtacagctccatggtgcggcccatctgcctgccggacgcctcccatgtcttccctgccggcaaggccatctgggtcacgggctggggacacacccagtatggaggcactggcgcgctgatcctgcaaaagggtgagatccgcgtcatcaaccagaccacctgcgagaacctcctgccgcgacagatcacgccgcgcatgatgtgcgtgggcttcctcagcggcggcgtggactcctgccagggtgattccgggggacccctgtccagcgtggaggcggatgggcggatcttccaggccggtgtggtgagctggggagacggctgcgctcagaggaacaagccaggcgtgtacacaaggctccctctgtttcgggactggatcaaagagaacactggggtataggggccggggccacccaaatgtgtacacctgcggggccacccatcgtccaccccagtgtgcacgcctgcaggctggagactggaccgctgactgcaccagcgcccccagaacatacactgtgaactcaatctccagggctccaaatctgcctagaaaacctctcgcttcctcagcctccaaagtggagctgggaggtagaaggggaggacactggtggttctactgacccaactgggggcaaaggtttgaagacacagcctcccccgccagccccaagctgggccgaggcgcgtttgtgtatatctgcctcccctgtctgtaaggagcagcgggaacggagcttcggagcctcctcagtgaaggtggtggggctgccggatctgggctgtggggcccttgggccacgctcttgaggaagcccaggctcggaggaccctggaaaacagacgggtctgagactgaaaatggtttaccagctcccaggtgacttcagtgtgtgtattgtgtaaatgagtaaaacattttatttctttttaaaaaaaaaaa

SEQ ID NO: 518 - DNA, 3149 bp, Homo sapiens
gacgcctgtgagacccgcgagcggcctcggggaccatggggagcgatcgggcccgcaagggcggagggggcccgaaggacttcggcgcgggactcaagtacaactcccggcacgagaaagtgaatggcttggaggaaggcgtggagttcctgccagtcaacaacgtcaagaaggtggaaaagcatggcccggggcgctgggtggtgctggcagccgtgctgatcggcctcctcttggtcttgctggggatcggcttcctggtgtggcatttgcagtaccgggacgtgcgtgtccagaaggtcttcaatggctacatgaggatcacaaatgagaattttgtggatgcctacgagaactccaactccactgagtttgtaagcctggccagcaaggtgaaggacgcgctgaagctgctgtacagcggagtcccattcctgggcccctaccacaaggagtcggctgtgacggccttcagcgagggcagcgtcatcgcctactactggtctgagttcagcatcccgcagcacctggtggaggaggccgagcgcgtcatggccgaggagcgcgtagtcatgctgcccccgcgggcgcgctccctgaagtcctttgtggtcacctcagtggtggctttccccacggactccaaaacagtacagaggacccaggacaacagctgcagctttggcctgcacgcccgcggtgtggagctgatgcgcttcaccacgcccggcttccctgacagcccctaccccgctcatgcccgctgccagtgggccctgcggggggacgccgactcagtgctgagcctcaccttccgcagctttgaccttgcgtcctgcgacgagcgcggcagcgacctggtgacggtgtacaacaccctgagccccatggagccccacgccctggtgcagttgtgtggcacctaccctccctcctacaacctgaccttccactcctcccagaacgtcctgctcatcacactgataaccaacactgagcggcggcatcccggctttgaggccaccttcttccagctgcctaggatgagcagctgtggaggccgcttacgtaaagcccaggggacattcaacagcccctactacccaggccactacccacccaacattgactgcacatggaacattgaggtgcccaacaaccagcatgtgaaggtgcgcttcaaattcttctacctgctggagcccggcgtgcctgcgggcacctgccccaaggactacgtggagatcaatggggagaaatactgcggagagaggtcccagttcgtcgtcaccagcaacagcaacaagatcacagttcgcttccactcagatcagtcctacaccgacaccggcttcttagctgaatacctctcctacgactccagtgacccatgcccggggcagttcacgtgccgcacggggcggtgtatccggaaggagctgcgctgtgatggctgggccgactgcaccgaccacagcgatgagctcaactgcagttgcgacgccggccaccagttcacgtgcaagaacaagttctgcaagcccctcttctgggtctgcgacagtgtgaacgactgcggagacaacagcgacgagcaggggtgcagttgtccggcccagaccttcaggtgttccaatgggaagtgcctctcgaaaagccagcagtgcaatgggaaggacgactgtggggacgggtccgacgaggcctcctgccccaaggtgaacgtcgtcacttgtaccaaacacacctaccgctgcctcaatgggctctgcttgagcaagggcaaccctgagtgtgacgggaaggaggactgtagcgacggctcagatgagaaggactgcgactgtgggctgcggtcattcacgagacaggctcgtgttgttgggggcacggatgcggatgagggcgagtggccctggcaggtaagcctgcatgctctgggccagggccacatctgcggtgcttccctcatctctcccaactggctggtctctgccgcacactgctacatcgatgacagaggattcaggtactcagaccccacgcagtggacggccttcctgggcttgcacgaccagagccagcgcagcgcccctggggtgcaggagcgcaggctcaagcgcatcatctcccaccccttcttcaatgacttcaccttcgactatgacatcgcgctgctggagctggagaaaccggcagagtacagctccatggtgcggcccatctgcctgccggacgcctcccatgtcttccctgccggcaaggccatctgggtcacgggctggggacacacccagtatggaggcactggcgcgctgatcctgcaaaagggtgagatccgcgtcatcaaccagaccacctgcgagaacctcctgccgaagcagatcacgccgcgcatgatgtgcgtgggcttcctcagcggcggcgtggactcctgccagggtgattccgggggacccctgtccagcgtggaggcggatgggcggatcttccaggccggtgtggtgagctggggagacggctgcgctcagaggaacaagccaggcgtgtacacaaggctccctctgtttcgggactggatcaaagagaacactggggtataggggccggggccacccaaatgtgtacacctgcggggccacccatcgtccaccccagtgtgcacgcctgcaggctggagactggaccgctgactgcaccagcgcccccagaacatacactgtgaactcaatctccagggctccaaatctgcctagaaaacctctcgcttcctcagcctccaaagtggagctgggaggtagaaggggaggacactggtggttctactgacccaactgggggcaaaggtttgaagacacagcctcccccgccagccccaagctgggccgaggcgcgtttgtgtatatctgcctcccctgtctgtaaggagcagcgggaacggagcttcggagcctcctcagtgaaggtggtggggctgccggatctgggctgtggggcccttgggccacgctcttgaggaagcccaggctcggaggaccctggaaaacagacgggtctgagactgaaaatggtttaccagctcccaggtgacttcagtgtgtgtattgtgtaaatgagtaaaacattttatttctttttaaaaaaaaaaa

SEQ ID NO: 519 - DNA, 3149 bp, Homo sapiens
gacgcctgtgagacccgcgagcggcctcggggaccatggggagcgatcgggcccgcaagggcggagggggcccgaaggacttcggcgcgggactcaagtacaactcccggcacgagaaagtgaatggcttggaggaaggcgtggagttcctgccagtcaacaacgtcaagaaggtggaaaagcatggcccggggcgctgggtggtgctggcagccgtgctgatcggcctcctcttggtcttgctggggatcggcttcctggtgtggcatttgcagtaccgggacgtgcgtgtccagaaggtcttcaatggctacatgaggatcacaaatgagaattttgtggatgcctacgagaactccaactccactgagtttgtaagcctggccagcaaggtgaaggacgcgctgaagctgctgtacagcggagtcccattcctgggcccctaccacaaggagtcggctgtgacggccttcagcgagggcagcgtcatcgcctactactggtctgagttcagcatcccgcagcacctggtggaggaggccgagcgcgtcatggccgaggagcgcgtagtcatgctgcccccgcgggcgcgctccctgaagtcctttgtggtcacctcagtggtggctttccccacggactccaaaacagtacagaggacccaggacaacagctgcagctttggcctgcacgcccgcggtgtggagctgatgcgcttcaccacgcccggcttccctgacagcccctaccccgctcatgcccgctgccagtgggccctgcggggggacgccgactcagtgctgagcctcaccttccgcagctttgaccttgcgtcctgcgacgagcgcggcagcgacctggtgacggtgtacaacaccctgagccccatggagccccacgccctggtgcagttgtgtggcacctaccctccctcctacaacctgaccttccactcctcccagaacgtcctgctcatcacactgataaccaacactgagcggcggcatcccggctttgaggccaccttcttccagctgcctaggatgagcagctgtggaggccgcttacgtaaagcccaggggacattcaacagcccctactacccaggccactacccacccaacattgactgcacatggaacattgaggtgcccaacaaccagcatgtgaaggtgcgcttcaaattcttctacctgctggagcccggcgtgcctgcgggcacctgccccaaggactacgtggagatcaatggggagaaatactgcggagagaggtcccagttcgtcgtcaccagcaacagcaacaagatcacagttcgcttccactcagatcagtcctacaccgacaccggcttcttagctgaatacctctcctacgactccagtgacccatgcccggggcagttcacgtgccgcacggggcggtgtatccggaaggagctgcgctgtgatggctgggccgactgcaccgaccacagcgatgagctcaactgcagttgcgacgccggccaccagttcacgtgcaagaacaagttctgcaagcccctcttctgggtctgcgacagtgtgaacgactgcggagacaacagcgacgagcaggggtgcagttgtccggcccagaccttcaggtgttccaatgggaagtgcctctcgaaaagccagcagtgcaatgggaaggacgactgtggggacgggtccgacgaggcctcctgccccaaggtgaacgtcgtcacttgtaccaaacacacctaccgctgcctcaatgggctctgcttgagcaagggcaaccctgagtgtgacgggaaggaggactgtagcgacggctcagatgagaaggactgcgactgtgggctgcggtcattcacgagacaggctcgtgttgttgggggcacggatgcggatgagggcgagtggccctggcaggtaagcctgcatgctctgggccagggccacatctgcggtgcttccctcatctctcccaactggctggtctctgccgcacactgctacatcgatgacagaggattcaggtactcagaccccacgcagtggacggccttcctgggcttgcacgaccagagccagcgcagcgcccctggggtgcaggagcgcaggctcaagcgcatcatctcccaccccttcttcaatgacttcaccttcgactatgacatcgcgctgctggagctggagaaaccggcagagtacagctccatggtgcggcccatctgcctgccggacgcctcccatgtcttccctgccggcaaggccatctgggtcacgggctggggacacacccagtatggaggcactggcgcgctgatcctgcaaaagggtgagatccgcgtcatcaaccagaccacctgcgagaacctcctgccgcagcagatcacgccgcgcatgatgtgcgtgggcttcctcagcggcggcgtggactcctgccagggtgattccgggggacccctgtccagcgtggaggcggatgggcggatcttccaggccggtgtggtgagctggggagctggctgcgctcagaggaacaagccaggcgtgtacacaaggctccctctgtttcgggactggatcaaagagaacactggggtataggggccggggccacccaaatgtgtacacctgcggggccacccatcgtccaccccagtgtgcacgcctgcaggctggagactggaccgctgactgcaccagcgcccccagaacatacactgtgaactcaatctccagggctccaaatctgcctagaaaacctctcgcttcctcagcctccaaagtggagctgggaggtagaaggggaggacactggtggttctactgacccaactgggggcaaaggtttgaagacacagcctcccccgccagccccaagctgggccgaggcgcgtttgtgtatatctgcctcccctgtctgtaaggagcagcgggaacggagcttcggagcctcctcagtgaaggtggtggggctgccggatctgggctgtggggcccttgggccacgctcttgaggaagcccaggctcggaggaccctggaaaacagacgggtctgagactgaaaatggtttaccagctcccaggtgacttcagtgtgtgtattgtgtaaatgagtaaaacattttatttctttttaaaaaaaaaaa

SEQ ID NO: 520 - DNA, 3149 bp, Homo sapiens
gacgcctgtgagacccgcgagcggcctcggggaccatggggagcgatcgggcccgcaagggcggagggggcccgaaggacttcggcgcgggactcaagtacaactcccggcacgagaaagtgaatggcttggaggaaggcgtggagttcctgccagtcaacaacgtcaagaaggtggaaaagcatggcccggggcgctgggtggtgctggcagccgtgctgatcggcctcctcttggtcttgctggggatcggcttcctggtgtggcatttgcagtaccgggacgtgcgtgtccagaaggtcttcaatggctacatgaggatcacaaatgagaattttgtggatgcctacgagaactccaactccactgagtttgtaagcctggccagcaaggtgaaggacgcgctgaagctgctgtacagcggagtcccattcctgggcccctaccacaaggagtcggctgtgacggccttcagcgagggcagcgtcatcgcctactactggtctgagttcagcatcccgcagcacctggtggaggaggccgagcgcgtcatggccgaggagcgcgtagtcatgctgcccccgcgggcgcgctccctgaagtcctttgtggtcacctcagtggtggctttccccacggactccaaaacagtacagaggacccaggacaacagctgcagctttggcctgcacgcccgcggtgtggagctgatgcgcttcaccacgcccggcttccctgacagcccctaccccgctcatgcccgctgccagtgggccctgcggggggacgccgactcagtgctgagcctcaccttccgcagctttgaccttgcgtcctgcgacgagcgcggcagcgacctggtgacggtgtacaacaccctgagccccatggagccccacgccctggtgcagttgtgtggcacctaccctccctcctacaacctgaccttccactcctcccagaacgtcctgctcatcacactgataaccaacactgagcggcggcatcccggctttgaggccaccttcttccagctgcctaggatgagcagctgtggaggccgcttacgtaaagcccaggggacattcaacagcccctactacccaggccactacccacccaacattgactgcacatggaacattgaggtgcccaacaaccagcatgtgaaggtgcgcttcaaattcttctacctgctggagcccggcgtgcctgcgggcacctgccccaaggactacgtggagatcaatggggagaaatactgcggagagaggtcccagttcgtcgtcaccagcaacagcaacaagatcacagttcgcttccactcagatcagtcctacaccgacaccggcttcttagctgaatacctctcctacgactccagtgacccatgcccggggcagttcacgtgccgcacggggcggtgtatccggaaggagctgcgctgtgatggctgggccgactgcaccgaccacagcgatgagctcaactgcagttgcgacgccggccaccagttcacgtgcaagaacaagttctgcaagcccctcttctgggtctgcgacagtgtgaacgactgcggagacaacagcgacgagcaggggtgcagttgtccggcccagaccttcaggtgttccaatgggaagtgcctctcgaaaagccagcagtgcaatgggaaggacgactgtggggacgggtccgacgaggcctcctgccccaaggtgaacgtcgtcacttgtaccaaacacacctaccgctgcctcaatgggctctgcttgagcaagggcaaccctgagtgtgacgggaaggaggactgtagcgacggctcagatgagaaggactgcgactgtgggctgcggtcattcacgagacaggctcgtgttgttgggggcacggatgcggatgagggcgagtggccctggcaggtaagcctgcatgctctgggccagggccacatctgcggtgcttccctcatctctcccaactggctggtctctgccgcacactgctacatcgatgacagaggattcaggtactcagaccccacgcagtggacggccttcctgggcttgcacgaccagagccagcgcagcgcccctggggtgcaggagcgcaggctcaagcgcatcatctcccaccccttcttcaatgacttcaccttcgactatgacatcgcgctgctggagctggagaaaccggcagagtacagctccatggtgcggcccatctgcctgccggacgcctcccatgtcttccctgccggcaaggccatctgggtcacgggctggggacacacccagtatggaggcactggcgcgctgatcctgcaaaagggtgagatccgcgtcatcaaccagaccacctgcgagaacctcctgccgcagcagatcacgccgcgcatgatgtgcgtgggcttcctcagcggcggcgtggactcctgccagggtgattccgggggacccctgtccagcgtggaggcggatgggcggatcttccaggccggtgtggtgagctggggagtaggctgcgctcagaggaacaagccaggcgtgtacacaaggctccctctgtttcgggactggatcaaagagaacactggggtataggggccggggccacccaaatgtgtacacctgcggggccacccatcgtccaccccagtgtgcacgcctgcaggctggagactggaccgctgactgcaccagcgcccccagaacatacactgtgaactcaatctccagggctccaaatctgcctagaaaacctctcgcttcctcagcctccaaagtggagctgggaggtagaaggggaggacactggtggttctactgacccaactgggggcaaaggtttgaagacacagcctcccccgccagccccaagctgggccgaggcgcgtttgtgtatatctgcctcccctgtctgtaaggagcagcgggaacggagcttcggagcctcctcagtgaaggtggtggggctgccggatctgggctgtggggcccttgggccacgctcttgaggaagcccaggctcggaggaccctggaaaacagacgggtctgagactgaaaatggtttaccagctcccaggtgacttcagtgtgtgtattgtgtaaatgagtaaaacattttatttctttttaaaaaaaaaaa

SEQ ID NO: 521 - DNA, 3149 bp, Homo sapiens
gacgcctgtgagacccgcgagcggcctcggggaccatggggagcgatcgggcccgcaagggcggagggggcccgaaggacttcggcgcgggactcaagtacaactcccggcacgagaaagtgaatggcttggaggaaggcgtggagttcctgccagtcaacaacgtcaagaaggtggaaaagcatggcccggggcgctgggtggtgctggcagccgtgctgatcggcctcctcttggtcttgctggggatcggcttcctggtgtggcatttgcagtaccgggacgtgcgtgtccagaaggtcttcaatggctacatgaggatcacaaatgagaattttgtggatgcctacgagaactccaactccactgagtttgtaagcctggccagcaaggtgaaggacgcgctgaagctgctgtacagcggagtcccattcctgggcccctaccacaaggagtcggctgtgacggccttcagcgagggcagcgtcatcgcctactactggtctgagttcagcatcccgcagcacctggtggaggaggccgagcgcgtcatggccgaggagcgcgtagtcatgctgcccccgcgggcgcgctccctgaagtcctttgtggtcacctcagtggtggctttccccacggactccaaaacagtacagaggacccaggacaacagctgcagctttggcctgcacgcccgcggtgtggagctgatgcgcttcaccacgcccggcttccctgacagcccctaccccgctcatgcccgctgccagtgggccctgcggggggacgccgactcagtgctgagcctcaccttccgcagctttgaccttgcgtcctgcgacgagcgcggcagcgacctggtgacggtgtacaacaccctgagccccatggagccccacgccctggtgcagttgtgtggcacctaccctccctcctacaacctgaccttccactcctcccagaacgtcctgctcatcacactgataaccaacactgagcggcggcatcccggctttgaggccaccttcttccagctgcctaggatgagcagctgtggaggccgcttacgtaaagcccaggggacattcaacagcccctactacccaggccactacccacccaacattgactgcacatggaacattgaggtgcccaacaaccagcatgtgaaggtgcgcttcaaattcttctacctgctggagcccggcgtgcctgcgggcacctgccccaaggactacgtggagatcaatggggagaaatactgcggagagaggtcccagttcgtcgtcaccagcaacagcaacaagatcacagttcgcttccactcagatcagtcctacaccgacaccggcttcttagctgaatacctctcctacgactccagtgacccatgcccggggcagttcacgtgccgcacggggcggtgtatccggaaggagctgcgctgtgatggctgggccgactgcaccgaccacagcgatgagctcaactgcagttgcgacgccggccaccagttcacgtgcaagaacaagttctgcaagcccctcttctgggtctgcgacagtgtgaacgactgcggagacaacagcgacgagcaggggtgcagttgtccggcccagaccttcaggtgttccaatgggaagtgcctctcgaaaagccagcagtgcaatgggaaggacgactgtggggacgggtccgacgaggcctcctgccccaaggtgaacgtcgtcacttgtaccaaacacacctaccgctgcctcaatgggctctgcttgagcaagggcaaccctgagtgtgacgggaaggaggactgtagcgacggctcagatgagaaggactgcgactgtgggctgcggtcattcacgagacaggctcgtgttgttgggggcacggatgcggatgagggcgagtggccctggcaggtaagcctgcatgctctgggccagggccacatctgcggtgcttccctcatctctcccaactggctggtctctgccgcacactgctacatcgatgacagaggattcaggtactcagaccccacgcagtggacggccttcctgggcttgcacgaccagagccagcgcagcgcccctggggtgcaggagcgcaggctcaagcgcatcatctcccaccccttcttcaatgacttcaccttcgactatgacatcgcgctgctggagctggagaaaccggcagagtacagctccatggtgcggcccatctgcctgccggacgcctcccatgtcttccctgccggcaaggccatctgggtcacgggctggggacacacccagtatggaggcactggcgcgctgatcctgcaaaagggtgagatccgcgtcatcaaccagaccacctgcgagaacctcctgccgcagcagatcacgccgcgcatgatgtgcgtgggcttcctcagcggcggcgtggactcctgcgaaggtgattccgggggacccctgtccagcgtggaggcggatgggcggatcttccaggccggtgtggtgagctggggagacggctgcgctcagaggaacaagccaggcgtgtacacaaggctccctctgtttcgggactggatcaaagagaacactggggtataggggccggggccacccaaatgtgtacacctgcggggccacccatcgtccaccccagtgtgcacgcctgcaggctggagactggaccgctgactgcaccagcgcccccagaacatacactgtgaactcaatctccagggctccaaatctgcctagaaaacctctcgcttcctcagcctccaaagtggagctgggaggtagaaggggaggacactggtggttctactgacccaactgggggcaaaggtttgaagacacagcctcccccgccagccccaagctgggccgaggcgcgtttgtgtatatctgcctcccctgtctgtaaggagcagcgggaacggagcttcggagcctcctcagtgaaggtggtggggctgccggatctgggctgtggggcccttgggccacgctcttgaggaagcccaggctcggaggaccctggaaaacagacgggtctgagactgaaaatggtttaccagctcccaggtgacttcagtgtgtgtattgtgtaaatgagtaaaacattttatttctttttaaaaaaaaaaa

SEQ ID NO: 522 - DNA, 3149 bp, Homo sapiens
gacgcctgtgagacccgcgagcggcctcggggaccatggggagcgatcgggcccgcaagggcggagggggcccgaaggacttcggcgcgggactcaagtacaactcccggcacgagaaagtgaatggcttggaggaaggcgtggagttcctgccagtcaacaacgtcaagaaggtggaaaagcatggcccggggcgctgggtggtgctggcagccgtgctgatcggcctcctcttggtcttgctggggatcggcttcctggtgtggcatttgcagtaccgggacgtgcgtgtccagaaggtcttcaatggctacatgaggatcacaaatgagaattttgtggatgcctacgagaactccaactccactgagtttgtaagcctggccagcaaggtgaaggacgcgctgaagctgctgtacagcggagtcccattcctgggcccctaccacaaggagtcggctgtgacggccttcagcgagggcagcgtcatcgcctactactggtctgagttcagcatcccgcagcacctggtggaggaggccgagcgcgtcatggccgaggagcgcgtagtcatgctgcccccgcgggcgcgctccctgaagtcctttgtggtcacctcagtggtggctttccccacggactccaaaacagtacagaggacccaggacaacagctgcagctttggcctgcacgcccgcggtgtggagctgatgcgcttcaccacgcccggcttccctgacagcccctaccccgctcatgcccgctgccagtgggccctgcggggggacgccgactcagtgctgagcctcaccttccgcagctttgaccttgcgtcctgcgacgagcgcggcagcgacctggtgacggtgtacaacaccctgagccccatggagccccacgccctggtgcagttgtgtggcacctaccctccctcctacaacctgaccttccactcctcccagaacgtcctgctcatcacactgataaccaacactgagcggcggcatcccggctttgaggccaccttcttccagctgcctaggatgagcagctgtggaggccgcttacgtaaagcccaggggacattcaacagcccctactacccaggccactacccacccaacattgactgcacatggaacattgaggtgcccaacaaccagcatgtgaaggtgcgcttcaaattcttctacctgctggagcccggcgtgcctgcgggcacctgccccaaggactacgtggagatcaatggggagaaatactgcggagagaggtcccagttcgtcgtcaccagcaacagcaacaagatcacagttcgcttccactcagatcagtcctacaccgacaccggcttcttagctgaatacctctcctacgactccagtgacccatgcccggggcagttcacgtgccgcacggggcggtgtatccggaaggagctgcgctgtgatggctgggccgactgcaccgaccacagcgatgagctcaactgcagttgcgacgccggccaccagttcacgtgcaagaacaagttctgcaagcccctcttctgggtctgcgacagtgtgaacgactgcggagacaacagcgacgagcaggggtgcagttgtccggcccagaccttcaggtgttccaatgggaagtgcctctcgaaaagccagcagtgcaatgggaaggacgactgtggggacgggtccgacgaggcctcctgccccaaggtgaacgtcgtcacttgtaccaaacacacctaccgctgcctcaatgggctctgcttgagcaagggcaaccctgagtgtgacgggaaggaggactgtagcgacggctcagatgagaaggactgcgactgtgggctgcggtcattcacgagacaggctcgtgttgttgggggcacggatgcggatgagggcgagtggccctggcaggtaagcctgcatgctctgggccagggccacatctgcggtgcttccctcatctctcccaactggctggtctctgccgcacactgctacatcgatgacagaggattcaggtactcagaccccacgcagtggacggccttcctgggcttgcacgaccagagccagcgcagcgcccctggggtgcaggagcgcaggctcaagcgcatcatctcccaccccttcttcaatgacttcacctgggactatgacatcgcgctgctggagctggagaaaccggcagagtacagctccatggtgcggcccatctgcctgccggacgcctcccatgtcttccctgccggcaaggccatctgggtcacgggctggggacacacccagtatggaggcactggcgcgctgatcctgcaaaagggtgagatccgcgtcatcaaccagaccacctgcgagaacctcctgccgcagcagatcacgccgcgcatgatgtgcgtgggcttcctcagcggcggcgtggactcctgccagggtgattccgggggacccctgtccagcgtggaggcggatgggcggatcttccaggccggtgtggtgagctggggagacggctgcgctcagaggaacaagccaggcgtgtacacaaggctccctctgtttcgggactggatcaaagagaacactggggtataggggccggggccacccaaatgtgtacacctgcggggccacccatcgtccaccccagtgtgcacgcctgcaggctggagactggaccgctgactgcaccagcgcccccagaacatacactgtgaactcaatctccagggctccaaatctgcctagaaaacctctcgcttcctcagcctccaaagtggagctgggaggtagaaggggaggacactggtggttctactgacccaactgggggcaaaggtttgaagacacagcctcccccgccagccccaagctgggccgaggcgcgtttgtgtatatctgcctcccctgtctgtaaggagcagcgggaacggagcttcggagcctcctcagtgaaggtggtggggctgccggatctgggctgtggggcccttgggccacgctcttgaggaagcccaggctcggaggaccctggaaaacagacgggtctgagactgaaaatggtttaccagctcccaggtgacttcagtgtgtgtattgtgtaaatgagtaaaacattttatttctttttaaaaaaaaaaa

SEQ ID NO: 523 - DNA, 3149 bp, Homo sapiens
gacgcctgtgagacccgcgagcggcctcggggaccatggggagcgatcgggcccgcaagggcggagggggcccgaaggacttcggcgcgggactcaagtacaactcccggcacgagaaagtgaatggcttggaggaaggcgtggagttcctgccagtcaacaacgtcaagaaggtggaaaagcatggcccggggcgctgggtggtgctggcagccgtgctgatcggcctcctcttggtcttgctggggatcggcttcctggtgtggcatttgcagtaccgggacgtgcgtgtccagaaggtcttcaatggctacatgaggatcacaaatgagaattttgtggatgcctacgagaactccaactccactgagtttgtaagcctggccagcaaggtgaaggacgcgctgaagctgctgtacagcggagtcccattcctgggcccctaccacaaggagtcggctgtgacggccttcagcgagggcagcgtcatcgcctactactggtctgagttcagcatcccgcagcacctggtggaggaggccgagcgcgtcatggccgaggagcgcgtagtcatgctgcccccgcgggcgcgctccctgaagtcctttgtggtcacctcagtggtggctttccccacggactccaaaacagtacagaggacccaggacaacagctgcagctttggcctgcacgcccgcggtgtggagctgatgcgcttcaccacgcccggcttccctgacagcccctaccccgctcatgcccgctgccagtgggccctgcggggggacgccgactcagtgctgagcctcaccttccgcagctttgaccttgcgtcctgcgacgagcgcggcagcgacctggtgacggtgtacaacaccctgagccccatggagccccacgccctggtgcagttgtgtggcacctaccctccctcctacaacctgaccttccactcctcccagaacgtcctgctcatcacactgataaccaacactgagcggcggcatcccggctttgaggccaccttcttccagctgcctaggatgagcagctgtggaggccgcttacgtaaagcccaggggacattcaacagcccctactacccaggccactacccacccaacattgactgcacatggaacattgaggtgcccaacaaccagcatgtgaaggtgcgcttcaaattcttctacctgctggagcccggcgtgcctgcgggcacctgccccaaggactacgtggagatcaatggggagaaatactgcggagagaggtcccagttcgtcgtcaccagcaacagcaacaagatcacagttcgcttccactcagatcagtcctacaccgacaccggcttcttagctgaatacctctcctacgactccagtgacccatgcccggggcagttcacgtgccgcacggggcggtgtatccggaaggagctgcgctgtgatggctgggccgactgcaccgaccacagcgatgagctcaactgcagttgcgacgccggccaccagttcacgtgcaagaacaagttctgcaagcccctcttctgggtctgcgacagtgtgaacgactgcggagacaacagcgacgagcaggggtgcagttgtccggcccagaccttcaggtgttccaatgggaagtgcctctcgaaaagccagcagtgcaatgggaaggacgactgtggggacgggtccgacgaggcctcctgccccaaggtgaacgtcgtcacttgtaccaaacacacctaccgctgcctcaatgggctctgcttgagcaagggcaaccctgagtgtgacgggaaggaggactgtagcgacggctcagatgagaaggactgcgactgtgggctgcggtcattcacgagacaggctcgtgttgttgggggcacggatgcggatgagggcgagtggccctggcaggtaagcctgcatgctctgggccagggccacatctgcggtgcttccctcatctctcccaactggctggtctctgccgcacactgctacatcgatgacagaggattcaggtactcagaccccacgcagtggacggccttcctgggcttgcacgaccagagccagcgcagcgcccctggggtgcaggagcgcaggctcaagcgcatcatctcccaccccttcttcaatgacttcacctatgactatgacatcgcgctgctggagctggagaaaccggcagagtacagctccatggtgcggcccatctgcctgccggacgcctcccatgtcttccctgccggcaaggccatctgggtcacgggctggggacacacccagtatggaggcactggcgcgctgatcctgcaaaagggtgagatccgcgtcatcaaccagaccacctgcgagaacctcctgccgcagcagatcacgccgcgcatgatgtgcgtgggcttcctcagcggcggcgtggactcctgccagggtgattccgggggacccctgtccagcgtggaggcggatgggcggatcttccaggccggtgtggtgagctggggagacggctgcgctcagaggaacaagccaggcgtgtacacaaggctccctctgtttcgggactggatcaaagagaacactggggtataggggccggggccacccaaatgtgtacacctgcggggccacccatcgtccaccccagtgtgcacgcctgcaggctggagactggaccgctgactgcaccagcgcccccagaacatacactgtgaactcaatctccagggctccaaatctgcctagaaaacctctcgcttcctcagcctccaaagtggagctgggaggtagaaggggaggacactggtggttctactgacccaactgggggcaaaggtttgaagacacagcctcccccgccagccccaagctgggccgaggcgcgtttgtgtatatctgcctcccctgtctgtaaggagcagcgggaacggagcttcggagcctcctcagtgaaggtggtggggctgccggatctgggctgtggggcccttgggccacgctcttgaggaagcccaggctcggaggaccctggaaaacagacgggtctgagactgaaaatggtttaccagctcccaggtgacttcagtgtgtgtattgtgtaaatgagtaaaacattttatttctttttaaaaaaaaaaa

SEQ ID NO: 524 - protein, 241 aa, Homo sapiens
VVGGTDADEGEWPWQVSLHALGQGHICGASLISPNWLVSAAHCYIDDRGFRYSDPTQWTAFLGLHDQSQRSAPGVQERRLKRIISHPFFNDFTFDYDIALLELEKPAEYSSMVRPICLPDASHVFPAGKAIWVTGWGHTQYGGTGALILQKGEIRVINQTTCENLLPLQITPRMMCVGFLSGGVDSCQGDSGGPLSSVEADGRIFQAGVVSWGDGCAQRNKPGVYTRLPLFRDWIKENTGV

SEQ ID NO: 525 - protein, 241 aa, Homo sapiens
VVGGTDADEGEWPWQVSLHALGQGHICGASLISPNWLVSAAHCYIDDRGFRYSDPTQWTAFLGLHDQSQRSAPGVQERRLKRIISHPFFNDFTFDYDIALLELEKPAEYSSMVRPICLPDASHVFPAGKAIWVTGWGHTQYGGTGALILQKGEIRVINQTTCENLLPYQITPRMMCVGFLSGGVDSCQGDSGGPLSSVEADGRIFQAGVVSWGDGCAQRNKPGVYTRLPLFRDWIKENTGV

SEQ ID NO: 526 - protein, 241 aa, Homo sapiens
VVGGTDADEGEWPWQVSLHALGQGHICGASLISPNWLVSAAHCYIDDRGFRYSDPTQWTAFLGLHDQSQRSAPGVQERRLKRIISHPFFNDFTFDYDIALLELEKPAEYSSMVRPICLPDASHVFPAGKAIWVTGWGHTQYGGTGALILQKGEIRVINQTTCENLLPQQITPREMCVGFLSGGVDSCQGDSGGPLSSVEADGRIFQAGVVSWGDGCAQRNKPGVYTRLPLFRDWIKENTGV

SEQ ID NO: 527 - protein, 241 aa, Homo sapiens
VVGGTDADEGEWPWQVSLHALGQGHICGASLISPNWLVSAAHCYIDDRGFRYSDPTQWTAFLGLHDQSQRSAPGVQERRLKRIISHPFFNDFTFDYDIALLELEKPAEYSSMVRPICLPDASHVFPAGKAIWVTGWGHTQYGGTGALILQKGEIRVINQTTCENLLPQQITPRMMCVGFLSGGVDSCKGDSGGPLSSVEADGRIFQAGVVSWGDGCAQRNKPGVYTRLPLFRDWIKENTGV

SEQ ID NO: 528 - protein, 241 aa, Homo sapiens
VVGGTDADEGEWPWQVSLHALGQGHICGASLISPNWLVSAAHCYIDDRGFRYSDPTQWTAFLGLHDQSQRSAPGVQERRLKRIISHPFFNDFTFDYDIALLELEKPAEYSSMVRPICLPDASHVFPAGKAIWVTGWGHTQYGGTGALILQKGEIRVINQTTCENLLPQQITPRMMCVGFLSGGVDSCYGDSGGPLSSVEADGRIFQAGVVSWGDGCAQRNKPGVYTRLPLFRDWIKENTGV

SEQ ID NO: 529 - protein, 855 aa, Homo sapiens
MGSDRARKGGGGPKDFGAGLKYNSRHEKVNGLEEGVEFLPVNNVKKVEKHGPGRWVVLAAVLIGLLLVLLGIGFLVWHLQYRDVRVQKVFNGYMRITNENFVDAYENSNSTEFVSLASKVKDALKLLYSGVPFLGPYHKESAVTAFSEGSVIAYYWSEFSIPQHLVEEAERVMAEERVVMLPPRARSLKSFVVTSVVAFPTDSKTVQRTQDNSCSFGLHARGVELMRFTTPGFPDSPYPAHARCQWALRGDADSVLSLTFRSFDLASCDERGSDLVTVYNTLSPMEPHALVQLCGTYPPSYNLTFHSSQNVLLITLITNTERRHPGFEATFFQLPRMSSCGGRLRKAQGTFNSPYYPGHYPPNIDCTWNIEVPNNQHVKVRFKFFYLLEPGVPAGTCPKDYVEINGEKYCGERSQFVVTSNSNKITVRFHSDQSYTDTGFLAEYLSYDSSDPCPGQFTCRTGRCIRKELRCDGWADCTDHSDELNCSCDAGHQFTCKNKFCKPLFWVCDSVNDCGDNSDEQGCSCPAQTFRCSNGKCLSKSQQCNGKDDCGDGSDEASCPKVNVVTCTKHTYRCLNGLCLSKGNPECDGKEDCSDGSDEKDCDCGLRSFTRQARVVGGTDADEGEWPWQVSLHALGQGHICGASLISPNWLVSAAHCYIDDRGFRYSDPTQWTAFLGLHDQSQRSAPGVQERRLKRIISHPFFNDFTFDYDIALLELEKPAEYSSMVRPICLPDASHVFPAGKAIWVTGWGHTQYGGTGALILQKGEIRVINQTTCENLLPLQITPRMMCVGFLSGGVDSCQGDSGGPLSSVEADGRIFQAGVVSWGDGCAQRNKPGVYTRLPLFRDWIKENTGV

SEQ ID NO: 530 - protein, 855 aa, Homo sapiens
MGSDRARKGGGGPKDFGAGLKYNSRHEKVNGLEEGVEFLPVNNVKKVEKHGPGRWVVLAAVLIGLLLVLLGIGFLVWHLQYRDVRVQKVFNGYMRITNENFVDAYENSNSTEFVSLASKVKDALKLLYSGVPFLGPYHKESAVTAFSEGSVIAYYWSEFSIPQHLVEEAERVMAEERVVMLPPRARSLKSFVVTSVVAFPTDSKTVQRTQDNSCSFGLHARGVELMRFTTPGFPDSPYPAHARCQWALRGDADSVLSLTFRSFDLASCDERGSDLVTVYNTLSPMEPHALVQLCGTYPPSYNLTFHSSQNVLLITLITNTERRHPGFEATFFQLPRMSSCGGRLRKAQGTFNSPYYPGHYPPNIDCTWNIEVPNNQHVKVRFKFFYLLEPGVPAGTCPKDYVEINGEKYCGERSQFVVTSNSNKITVRFHSDQSYTDTGFLAEYLSYDSSDPCPGQFTCRTGRCIRKELRCDGWADCTDHSDELNCSCDAGHQFTCKNKFCKPLFWVCDSVNDCGDNSDEQGCSCPAQTFRCSNGKCLSKSQQCNGKDDCGDGSDEASCPKVNVVTCTKHTYRCLNGLCLSKGNPECDGKEDCSDGSDEKDCDCGLRSFTRQARVVGGTDADEGEWPWQVSLHALGQGHICGASLISPNWLVSAAHCYIDDRGFRYSDPTQWTAFLGLHDQSQRSAPGVQERRLKRIISHPFFNDFTFDYDIALLELEKPAEYSSMVRPICLPDASHVFPAGKAIWVTGWGHTQYGGTGALILQKGEIRVINQTTCENLLPYQITPRMMCVGFLSGGVDSCQGDSGGPLSSVEADGRIFQAGVVSWGDGCAQRNKPGVYTRLPLFRDWIKENTGV

SEQ ID NO: 531 - protein, 855 aa, Homo sapiens
MGSDRARKGGGGPKDFGAGLKYNSRHEKVNGLEEGVEFLPVNNVKKVEKHGPGRWVVLAAVLIGLLLVLLGIGFLVWHLQYRDVRVQKVFNGYMRITNENFVDAYENSNSTEFVSLASKVKDALKLLYSGVPFLGPYHKESAVTAFSEGSVIAYYWSEFSIPQHLVEEAERVMAEERVVMLPPRARSLKSFVVTSVVAFPTDSKTVQRTQDNSCSFGLHARGVELMRFTTPGFPDSPYPAHARCQWALRGDADSVLSLTFRSFDLASCDERGSDLVTVYNTLSPMEPHALVQLCGTYPPSYNLTFHSSQNVLLITLITNTERRHPGFEATFFQLPRMSSCGGRLRKAQGTFNSPYYPGHYPPNIDCTWNIEVPNNQHVKVRFKFFYLLEPGVPAGTCPKDYVEINGEKYCGERSQFVVTSNSNKITVRFHSDQSYTDTGFLAEYLSYDSSDPCPGQFTCRTGRCIRKELRCDGWADCTDHSDELNCSCDAGHQFTCKNKFCKPLFWVCDSVNDCGDNSDEQGCSCPAQTFRCSNGKCLSKSQQCNGKDDCGDGSDEASCPKVNVVTCTKHTYRCLNGLCLSKGNPECDGKEDCSDGSDEKDCDCGLRSFTRQARVVGGTDADEGEWPWQVSLHALGQGHICGASLISPNWLVSAAHCYIDDRGFRYSDPTQWTAFLGLHDQSQRSAPGVQERRLKRIISHPFFNDFTFDYDIALLELEKPAEYSSMVRPICLPDASHVFPAGKAIWVTGWGHTQYGGTGALILQKGEIRVINQTTCENLLPQQITPREMCVGFLSGGVDSCQGDSGGPLSSVEADGRIFQAGVVSWGDGCAQRNKPGVYTRLPLFRDWIKENTGV

SEQ ID NO: 532 - protein, 855 aa, Homo sapiens
MGSDRARKGGGGPKDFGAGLKYNSRHEKVNGLEEGVEFLPVNNVKKVEKHGPGRWVVLAAVLIGLLLVLLGIGFLVWHLQYRDVRVQKVFNGYMRITNENFVDAYENSNSTEFVSLASKVKDALKLLYSGVPFLGPYHKESAVTAFSEGSVIAYYWSEFSIPQHLVEEAERVMAEERVVMLPPRARSLKSFVVTSVVAFPTDSKTVQRTQDNSCSFGLHARGVELMRFTTPGFPDSPYPAHARCQWALRGDADSVLSLTFRSFDLASCDERGSDLVTVYNTLSPMEPHALVQLCGTYPPSYNLTFHSSQNVLLITLITNTERRHPGFEATFFQLPRMSSCGGRLRKAQGTFNSPYYPGHYPPNIDCTWNIEVPNNQHVKVRFKFFYLLEPGVPAGTCPKDYVEINGEKYCGERSQFVVTSNSNKITVRFHSDQSYTDTGFLAEYLSYDSSDPCPGQFTCRTGRCIRKELRCDGWADCTDHSDELNCSCDAGHQFTCKNKFCKPLFWVCDSVNDCGDNSDEQGCSCPAQTFRCSNGKCLSKSQQCNGKDDCGDGSDEASCPKVNVVTCTKHTYRCLNGLCLSKGNPECDGKEDCSDGSDEKDCDCGLRSFTRQARVVGGTDADEGEWPWQVSLHALGQGHICGASLISPNWLVSAAHCYIDDRGFRYSDPTQWTAFLGLHDQSQRSAPGVQERRLKRIISHPFFNDFTFDYDIALLELEKPAEYSSMVRPICLPDASHVFPAGKAIWVTGWGHTQYGGTGALILQKGEIRVINQTTCENLLPQQITPRMMCVGFLSGGVDSCKGDSGGPLSSVEADGRIFQAGVVSWGDGCAQRNKPGVYTRLPLFRDWIKENTGV

SEQ ID NO: 533 - protein, 855 aa, Homo sapiens
MGSDRARKGGGGPKDFGAGLKYNSRHEKVNGLEEGVEFLPVNNVKKVEKHGPGRWVVLAAVLIGLLLVLLGIGFLVWHLQYRDVRVQKVFNGYMRITNENFVDAYENSNSTEFVSLASKVKDALKLLYSGVPFLGPYHKESAVTAFSEGSVIAYYWSEFSIPQHLVEEAERVMAEERVVMLPPRARSLKSFVVTSVVAFPTDSKTVQRTQDNSCSFGLHARGVELMRFTTPGFPDSPYPAHARCQWALRGDADSVLSLTFRSFDLASCDERGSDLVTVYNTLSPMEPHALVQLCGTYPPSYNLTFHSSQNVLLITLITNTERRHPGFEATFFQLPRMSSCGGRLRKAQGTFNSPYYPGHYPPNIDCTWNIEVPNNQHVKVRFKFFYLLEPGVPAGTCPKDYVEINGEKYCGERSQFVVTSNSNKITVRFHSDQSYTDTGFLAEYLSYDSSDPCPGQFTCRTGRCIRKELRCDGWADCTDHSDELNCSCDAGHQFTCKNKFCKPLFWVCDSVNDCGDNSDEQGCSCPAQTFRCSNGKCLSKSQQCNGKDDCGDGSDEASCPKVNVVTCTKHTYRCLNGLCLSKGNPECDGKEDCSDGSDEKDCDCGLRSFTRQARVVGGTDADEGEWPWQVSLHALGQGHICGASLISPNWLVSAAHCYIDDRGFRYSDPTQWTAFLGLHDQSQRSAPGVQERRLKRIISHPFFNDFTFDYDIALLELEKPAEYSSMVRPICLPDASHVFPAGKAIWVTGWGHTQYGGTGALILQKGEIRVINQTTCENLLPQQITPRMMCVGFLSGGVDSCYGDSGGPLSSVEADGRIFQAGVVSWGDGCAQRNKPGVYTRLPLFRDWIKENTGV

SEQ ID NO: 534 - DNA, 723 bp, Homo sapiens
gttgttgggggcacggatgcggatgagggcgagtggccctggcaggtaagcctgcatgctctgggccagggccacatctgcggtgcttccctcatctctcccaactggctggtctctgccgcacactgctacatcgatgacagaggattcaggtactcagaccccacgcagtggacggccttcctgggcttgcacgaccagagccagcgcagcgcccctggggtgcaggagcgcaggctcaagcgcatcatctcccaccccttcttcaatgacttcaccttcgactatgacatcgcgctgctggagctggagaaaccggcagagtacagctccatggtgcggcccatctgcctgccggacgcctcccatgtcttccctgccggcaaggccatctgggtcacgggctggggacacacccagtatggaggcactggcgcgctgatcctgcaaaagggtgagatccgcgtcatcaaccagaccacctgcgagaacctcctgccgttgcagatcacgccgcgcatgatgtgcgtgggcttcctcagcggcggcgtggactcctgccagggtgattccgggggacccctgtccagcgtggaggcggatgggcggatcttccaggccggtgtggtgagctggggagacggctgcgctcagaggaacaagccaggcgtgtacacaaggctccctctgtttcgggactggatcaaagagaacactggggta

SEQ ID NO: 535 - DNA, 723 bp, Homo sapiens
gttgttgggggcacggatgcggatgagggcgagtggccctggcaggtaagcctgcatgctctgggccagggccacatctgcggtgcttccctcatctctcccaactggctggtctctgccgcacactgctacatcgatgacagaggattcaggtactcagaccccacgcagtggacggccttcctgggcttgcacgaccagagccagcgcagcgcccctggggtgcaggagcgcaggctcaagcgcatcatctcccaccccttcttcaatgacttcaccttcgactatgacatcgcgctgctggagctggagaaaccggcagagtacagctccatggtgcggcccatctgcctgccggacgcctcccatgtcttccctgccggcaaggccatctgggtcacgggctggggacacacccagtatggaggcactggcgcgctgatcctgcaaaagggtgagatccgcgtcatcaaccagaccacctgcgagaacctcctgccgtatcagatcacgccgcgcatgatgtgcgtgggcttcctcagcggcggcgtggactcctgccagggtgattccgggggacccctgtccagcgtggaggcggatgggcggatcttccaggccggtgtggtgagctggggagacggctgcgctcagaggaacaagccaggcgtgtacacaaggctccctctgtttcgggactggatcaaagagaacactggggta

SEQ ID NO: 536 - DNA, 723 bp, Homo sapiens
gttgttgggggcacggatgcggatgagggcgagtggccctggcaggtaagcctgcatgctctgggccagggccacatctgcggtgcttccctcatctctcccaactggctggtctctgccgcacactgctacatcgatgacagaggattcaggtactcagaccccacgcagtggacggccttcctgggcttgcacgaccagagccagcgcagcgcccctggggtgcaggagcgcaggctcaagcgcatcatctcccaccccttcttcaatgacttcaccttcgactatgacatcgcgctgctggagctggagaaaccggcagagtacagctccatggtgcggcccatctgcctgccggacgcctcccatgtcttccctgccggcaaggccatctgggtcacgggctggggacacacccagtatggaggcactggcgcgctgatcctgcaaaagggtgagatccgcgtcatcaaccagaccacctgcgagaacctcctgccgcagcagatcacgccgcgcgagatgtgcgtgggcttcctcagcggcggcgtggactcctgccagggtgattccgggggacccctgtccagcgtggaggcggatgggcggatcttccaggccggtgtggtgagctggggagacggctgcgctcagaggaacaagccaggcgtgtacacaaggctccctctgtttcgggactggatcaaagagaacactggggta

SEQ ID NO: 537 - DNA, 723 bp, Homo sapiens
gttgttgggggcacggatgcggatgagggcgagtggccctggcaggtaagcctgcatgctctgggccagggccacatctgcggtgcttccctcatctctcccaactggctggtctctgccgcacactgctacatcgatgacagaggattcaggtactcagaccccacgcagtggacggccttcctgggcttgcacgaccagagccagcgcagcgcccctggggtgcaggagcgcaggctcaagcgcatcatctcccaccccttcttcaatgacttcaccttcgactatgacatcgcgctgctggagctggagaaaccggcagagtacagctccatggtgcggcccatctgcctgccggacgcctcccatgtcttccctgccggcaaggccatctgggtcacgggctggggacacacccagtatggaggcactggcgcgctgatcctgcaaaagggtgagatccgcgtcatcaaccagaccacctgcgagaacctcctgccgcagcagatcacgccgcgcatgatgtgcgtgggcttcctcagcggcggcgtggactcctgcaagggtgattccgggggacccctgtccagcgtggaggcggatgggcggatcttccaggccggtgtggtgagctggggagacggctgcgctcagaggaacaagccaggcgtgtacacaaggctccctctgtttcgggactggatcaaagagaacactggggta

SEQ ID NO: 538 - DNA, 723 bp, Homo sapiens
gttgttgggggcacggatgcggatgagggcgagtggccctggcaggtaagcctgcatgctctgggccagggccacatctgcggtgcttccctcatctctcccaactggctggtctctgccgcacactgctacatcgatgacagaggattcaggtactcagaccccacgcagtggacggccttcctgggcttgcacgaccagagccagcgcagcgcccctggggtgcaggagcgcaggctcaagcgcatcatctcccaccccttcttcaatgacttcaccttcgactatgacatcgcgctgctggagctggagaaaccggcagagtacagctccatggtgcggcccatctgcctgccggacgcctcccatgtcttccctgccggcaaggccatctgggtcacgggctggggacacacccagtatggaggcactggcgcgctgatcctgcaaaagggtgagatccgcgtcatcaaccagaccacctgcgagaacctcctgccgcagcagatcacgccgcgcatgatgtgcgtgggcttcctcagcggcggcgtggactcctgctatggtgattccgggggacccctgtccagcgtggaggcggatgggcggatcttccaggccggtgtggtgagctggggagacggctgcgctcagaggaacaagccaggcgtgtacacaaggctccctctgtttcgggactggatcaaagagaacactggggta

SEQ ID NO: 539 - DNA, 3149 bp, Homo sapiens
gacgcctgtgagacccgcgagcggcctcggggaccatggggagcgatcgggcccgcaagggcggagggggcccgaaggacttcggcgcgggactcaagtacaactcccggcacgagaaagtgaatggcttggaggaaggcgtggagttcctgccagtcaacaacgtcaagaaggtggaaaagcatggcccggggcgctgggtggtgctggcagccgtgctgatcggcctcctcttggtcttgctggggatcggcttcctggtgtggcatttgcagtaccgggacgtgcgtgtccagaaggtcttcaatggctacatgaggatcacaaatgagaattttgtggatgcctacgagaactccaactccactgagtttgtaagcctggccagcaaggtgaaggacgcgctgaagctgctgtacagcggagtcccattcctgggcccctaccacaaggagtcggctgtgacggccttcagcgagggcagcgtcatcgcctactactggtctgagttcagcatcccgcagcacctggtggaggaggccgagcgcgtcatggccgaggagcgcgtagtcatgctgcccccgcgggcgcgctccctgaagtcctttgtggtcacctcagtggtggctttccccacggactccaaaacagtacagaggacccaggacaacagctgcagctttggcctgcacgcccgcggtgtggagctgatgcgcttcaccacgcccggcttccctgacagcccctaccccgctcatgcccgctgccagtgggccctgcggggggacgccgactcagtgctgagcctcaccttccgcagctttgaccttgcgtcctgcgacgagcgcggcagcgacctggtgacggtgtacaacaccctgagccccatggagccccacgccctggtgcagttgtgtggcacctaccctccctcctacaacctgaccttccactcctcccagaacgtcctgctcatcacactgataaccaacactgagcggcggcatcccggctttgaggccaccttcttccagctgcctaggatgagcagctgtggaggccgcttacgtaaagcccaggggacattcaacagcccctactacccaggccactacccacccaacattgactgcacatggaacattgaggtgcccaacaaccagcatgtgaaggtgcgcttcaaattcttctacctgctggagcccggcgtgcctgcgggcacctgccccaaggactacgtggagatcaatggggagaaatactgcggagagaggtcccagttcgtcgtcaccagcaacagcaacaagatcacagttcgcttccactcagatcagtcctacaccgacaccggcttcttagctgaatacctctcctacgactccagtgacccatgcccggggcagttcacgtgccgcacggggcggtgtatccggaaggagctgcgctgtgatggctgggccgactgcaccgaccacagcgatgagctcaactgcagttgcgacgccggccaccagttcacgtgcaagaacaagttctgcaagcccctcttctgggtctgcgacagtgtgaacgactgcggagacaacagcgacgagcaggggtgcagttgtccggcccagaccttcaggtgttccaatgggaagtgcctctcgaaaagccagcagtgcaatgggaaggacgactgtggggacgggtccgacgaggcctcctgccccaaggtgaacgtcgtcacttgtaccaaacacacctaccgctgcctcaatgggctctgcttgagcaagggcaaccctgagtgtgacgggaaggaggactgtagcgacggctcagatgagaaggactgcgactgtgggctgcggtcattcacgagacaggctcgtgttgttgggggcacggatgcggatgagggcgagtggccctggcaggtaagcctgcatgctctgggccagggccacatctgcggtgcttccctcatctctcccaactggctggtctctgccgcacactgctacatcgatgacagaggattcaggtactcagaccccacgcagtggacggccttcctgggcttgcacgaccagagccagcgcagcgcccctggggtgcaggagcgcaggctcaagcgcatcatctcccaccccttcttcaatgacttcaccttcgactatgacatcgcgctgctggagctggagaaaccggcagagtacagctccatggtgcggcccatctgcctgccggacgcctcccatgtcttccctgccggcaaggccatctgggtcacgggctggggacacacccagtatggaggcactggcgcgctgatcctgcaaaagggtgagatccgcgtcatcaaccagaccacctgcgagaacctcctgccgttgcagatcacgccgcgcatgatgtgcgtgggcttcctcagcggcggcgtggactcctgccagggtgattccgggggacccctgtccagcgtggaggcggatgggcggatcttccaggccggtgtggtgagctggggagacggctgcgctcagaggaacaagccaggcgtgtacacaaggctccctctgtttcgggactggatcaaagagaacactggggtataggggccggggccacccaaatgtgtacacctgcggggccacccatcgtccaccccagtgtgcacgcctgcaggctggagactggaccgctgactgcaccagcgcccccagaacatacactgtgaactcaatctccagggctccaaatctgcctagaaaacctctcgcttcctcagcctccaaagtggagctgggaggtagaaggggaggacactggtggttctactgacccaactgggggcaaaggtttgaagacacagcctcccccgccagccccaagctgggccgaggcgcgtttgtgtatatctgcctcccctgtctgtaaggagcagcgggaacggagcttcggagcctcctcagtgaaggtggtggggctgccggatctgggctgtggggcccttgggccacgctcttgaggaagcccaggctcggaggaccctggaaaacagacgggtctgagactgaaaatggtttaccagctcccaggtgacttcagtgtgtgtattgtgtaaatgagtaaaacattttatttctttttaaaaaaaaaaa

SEQ ID NO: 540 - DNA, 3149 bp, Homo sapiens
gacgcctgtgagacccgcgagcggcctcggggaccatggggagcgatcgggcccgcaagggcggagggggcccgaaggacttcggcgcgggactcaagtacaactcccggcacgagaaagtgaatggcttggaggaaggcgtggagttcctgccagtcaacaacgtcaagaaggtggaaaagcatggcccggggcgctgggtggtgctggcagccgtgctgatcggcctcctcttggtcttgctggggatcggcttcctggtgtggcatttgcagtaccgggacgtgcgtgtccagaaggtcttcaatggctacatgaggatcacaaatgagaattttgtggatgcctacgagaactccaactccactgagtttgtaagcctggccagcaaggtgaaggacgcgctgaagctgctgtacagcggagtcccattcctgggcccctaccacaaggagtcggctgtgacggccttcagcgagggcagcgtcatcgcctactactggtctgagttcagcatcccgcagcacctggtggaggaggccgagcgcgtcatggccgaggagcgcgtagtcatgctgcccccgcgggcgcgctccctgaagtcctttgtggtcacctcagtggtggctttccccacggactccaaaacagtacagaggacccaggacaacagctgcagctttggcctgcacgcccgcggtgtggagctgatgcgcttcaccacgcccggcttccctgacagcccctaccccgctcatgcccgctgccagtgggccctgcggggggacgccgactcagtgctgagcctcaccttccgcagctttgaccttgcgtcctgcgacgagcgcggcagcgacctggtgacggtgtacaacaccctgagccccatggagccccacgccctggtgcagttgtgtggcacctaccctccctcctacaacctgaccttccactcctcccagaacgtcctgctcatcacactgataaccaacactgagcggcggcatcccggctttgaggccaccttcttccagctgcctaggatgagcagctgtggaggccgcttacgtaaagcccaggggacattcaacagcccctactacccaggccactacccacccaacattgactgcacatggaacattgaggtgcccaacaaccagcatgtgaaggtgcgcttcaaattcttctacctgctggagcccggcgtgcctgcgggcacctgccccaaggactacgtggagatcaatggggagaaatactgcggagagaggtcccagttcgtcgtcaccagcaacagcaacaagatcacagttcgcttccactcagatcagtcctacaccgacaccggcttcttagctgaatacctctcctacgactccagtgacccatgcccggggcagttcacgtgccgcacggggcggtgtatccggaaggagctgcgctgtgatggctgggccgactgcaccgaccacagcgatgagctcaactgcagttgcgacgccggccaccagttcacgtgcaagaacaagttctgcaagcccctcttctgggtctgcgacagtgtgaacgactgcggagacaacagcgacgagcaggggtgcagttgtccggcccagaccttcaggtgttccaatgggaagtgcctctcgaaaagccagcagtgcaatgggaaggacgactgtggggacgggtccgacgaggcctcctgccccaaggtgaacgtcgtcacttgtaccaaacacacctaccgctgcctcaatgggctctgcttgagcaagggcaaccctgagtgtgacgggaaggaggactgtagcgacggctcagatgagaaggactgcgactgtgggctgcggtcattcacgagacaggctcgtgttgttgggggcacggatgcggatgagggcgagtggccctggcaggtaagcctgcatgctctgggccagggccacatctgcggtgcttccctcatctctcccaactggctggtctctgccgcacactgctacatcgatgacagaggattcaggtactcagaccccacgcagtggacggccttcctgggcttgcacgaccagagccagcgcagcgcccctggggtgcaggagcgcaggctcaagcgcatcatctcccaccccttcttcaatgacttcaccttcgactatgacatcgcgctgctggagctggagaaaccggcagagtacagctccatggtgcggcccatctgcctgccggacgcctcccatgtcttccctgccggcaaggccatctgggtcacgggctggggacacacccagtatggaggcactggcgcgctgatcctgcaaaagggtgagatccgcgtcatcaaccagaccacctgcgagaacctcctgccgtatcagatcacgccgcgcatgatgtgcgtgggcttcctcagcggcggcgtggactcctgccagggtgattccgggggacccctgtccagcgtggaggcggatgggcggatcttccaggccggtgtggtgagctggggagacggctgcgctcagaggaacaagccaggcgtgtacacaaggctccctctgtttcgggactggatcaaagagaacactggggtataggggccggggccacccaaatgtgtacacctgcggggccacccatcgtccaccccagtgtgcacgcctgcaggctggagactggaccgctgactgcaccagcgcccccagaacatacactgtgaactcaatctccagggctccaaatctgcctagaaaacctctcgcttcctcagcctccaaagtggagctgggaggtagaaggggaggacactggtggttctactgacccaactgggggcaaaggtttgaagacacagcctcccccgccagccccaagctgggccgaggcgcgtttgtgtatatctgcctcccctgtctgtaaggagcagcgggaacggagcttcggagcctcctcagtgaaggtggtggggctgccggatctgggctgtggggcccttgggccacgctcttgaggaagcccaggctcggaggaccctggaaaacagacgggtctgagactgaaaatggtttaccagctcccaggtgacttcagtgtgtgtattgtgtaaatgagtaaaacattttatttctttttaaaaaaaaaaa

SEQ ID NO: 541 - DNA, 3149 bp, Homo sapiens
gacgcctgtgagacccgcgagcggcctcggggaccatggggagcgatcgggcccgcaagggcggagggggcccgaaggacttcggcgcgggactcaagtacaactcccggcacgagaaagtgaatggcttggaggaaggcgtggagttcctgccagtcaacaacgtcaagaaggtggaaaagcatggcccggggcgctgggtggtgctggcagccgtgctgatcggcctcctcttggtcttgctggggatcggcttcctggtgtggcatttgcagtaccgggacgtgcgtgtccagaaggtcttcaatggctacatgaggatcacaaatgagaattttgtggatgcctacgagaactccaactccactgagtttgtaagcctggccagcaaggtgaaggacgcgctgaagctgctgtacagcggagtcccattcctgggcccctaccacaaggagtcggctgtgacggccttcagcgagggcagcgtcatcgcctactactggtctgagttcagcatcccgcagcacctggtggaggaggccgagcgcgtcatggccgaggagcgcgtagtcatgctgcccccgcgggcgcgctccctgaagtcctttgtggtcacctcagtggtggctttccccacggactccaaaacagtacagaggacccaggacaacagctgcagctttggcctgcacgcccgcggtgtggagctgatgcgcttcaccacgcccggcttccctgacagcccctaccccgctcatgcccgctgccagtgggccctgcggggggacgccgactcagtgctgagcctcaccttccgcagctttgaccttgcgtcctgcgacgagcgcggcagcgacctggtgacggtgtacaacaccctgagccccatggagccccacgccctggtgcagttgtgtggcacctaccctccctcctacaacctgaccttccactcctcccagaacgtcctgctcatcacactgataaccaacactgagcggcggcatcccggctttgaggccaccttcttccagctgcctaggatgagcagctgtggaggccgcttacgtaaagcccaggggacattcaacagcccctactacccaggccactacccacccaacattgactgcacatggaacattgaggtgcccaacaaccagcatgtgaaggtgcgcttcaaattcttctacctgctggagcccggcgtgcctgcgggcacctgccccaaggactacgtggagatcaatggggagaaatactgcggagagaggtcccagttcgtcgtcaccagcaacagcaacaagatcacagttcgcttccactcagatcagtcctacaccgacaccggcttcttagctgaatacctctcctacgactccagtgacccatgcccggggcagttcacgtgccgcacggggcggtgtatccggaaggagctgcgctgtgatggctgggccgactgcaccgaccacagcgatgagctcaactgcagttgcgacgccggccaccagttcacgtgcaagaacaagttctgcaagcccctcttctgggtctgcgacagtgtgaacgactgcggagacaacagcgacgagcaggggtgcagttgtccggcccagaccttcaggtgttccaatgggaagtgcctctcgaaaagccagcagtgcaatgggaaggacgactgtggggacgggtccgacgaggcctcctgccccaaggtgaacgtcgtcacttgtaccaaacacacctaccgctgcctcaatgggctctgcttgagcaagggcaaccctgagtgtgacgggaaggaggactgtagcgacggctcagatgagaaggactgcgactgtgggctgcggtcattcacgagacaggctcgtgttgttgggggcacggatgcggatgagggcgagtggccctggcaggtaagcctgcatgctctgggccagggccacatctgcggtgcttccctcatctctcccaactggctggtctctgccgcacactgctacatcgatgacagaggattcaggtactcagaccccacgcagtggacggccttcctgggcttgcacgaccagagccagcgcagcgcccctggggtgcaggagcgcaggctcaagcgcatcatctcccaccccttcttcaatgacttcaccttcgactatgacatcgcgctgctggagctggagaaaccggcagagtacagctccatggtgcggcccatctgcctgccggacgcctcccatgtcttccctgccggcaaggccatctgggtcacgggctggggacacacccagtatggaggcactggcgcgctgatcctgcaaaagggtgagatccgcgtcatcaaccagaccacctgcgagaacctcctgccgcagcagatcacgccgcgcgagatgtgcgtgggcttcctcagcggcggcgtggactcctgccagggtgattccgggggacccctgtccagcgtggaggcggatgggcggatcttccaggccggtgtggtgagctggggagacggctgcgctcagaggaacaagccaggcgtgtacacaaggctccctctgtttcgggactggatcaaagagaacactggggtataggggccggggccacccaaatgtgtacacctgcggggccacccatcgtccaccccagtgtgcacgcctgcaggctggagactggaccgctgactgcaccagcgcccccagaacatacactgtgaactcaatctccagggctccaaatctgcctagaaaacctctcgcttcctcagcctccaaagtggagctgggaggtagaaggggaggacactggtggttctactgacccaactgggggcaaaggtttgaagacacagcctcccccgccagccccaagctgggccgaggcgcgtttgtgtatatctgcctcccctgtctgtaaggagcagcgggaacggagcttcggagcctcctcagtgaaggtggtggggctgccggatctgggctgtggggcccttgggccacgctcttgaggaagcccaggctcggaggaccctggaaaacagacgggtctgagactgaaaatggtttaccagctcccaggtgacttcagtgtgtgtattgtgtaaatgagtaaaacattttatttctttttaaaaaaaaaaa

SEQ ID NO: 542 - DNA, 3149 bp, Homo sapiens
gacgcctgtgagacccgcgagcggcctcggggaccatggggagcgatcgggcccgcaagggcggagggggcccgaaggacttcggcgcgggactcaagtacaactcccggcacgagaaagtgaatggcttggaggaaggcgtggagttcctgccagtcaacaacgtcaagaaggtggaaaagcatggcccggggcgctgggtggtgctggcagccgtgctgatcggcctcctcttggtcttgctggggatcggcttcctggtgtggcatttgcagtaccgggacgtgcgtgtccagaaggtcttcaatggctacatgaggatcacaaatgagaattttgtggatgcctacgagaactccaactccactgagtttgtaagcctggccagcaaggtgaaggacgcgctgaagctgctgtacagcggagtcccattcctgggcccctaccacaaggagtcggctgtgacggccttcagcgagggcagcgtcatcgcctactactggtctgagttcagcatcccgcagcacctggtggaggaggccgagcgcgtcatggccgaggagcgcgtagtcatgctgcccccgcgggcgcgctccctgaagtcctttgtggtcacctcagtggtggctttccccacggactccaaaacagtacagaggacccaggacaacagctgcagctttggcctgcacgcccgcggtgtggagctgatgcgcttcaccacgcccggcttccctgacagcccctaccccgctcatgcccgctgccagtgggccctgcggggggacgccgactcagtgctgagcctcaccttccgcagctttgaccttgcgtcctgcgacgagcgcggcagcgacctggtgacggtgtacaacaccctgagccccatggagccccacgccctggtgcagttgtgtggcacctaccctccctcctacaacctgaccttccactcctcccagaacgtcctgctcatcacactgataaccaacactgagcggcggcatcccggctttgaggccaccttcttccagctgcctaggatgagcagctgtggaggccgcttacgtaaagcccaggggacattcaacagcccctactacccaggccactacccacccaacattgactgcacatggaacattgaggtgcccaacaaccagcatgtgaaggtgcgcttcaaattcttctacctgctggagcccggcgtgcctgcgggcacctgccccaaggactacgtggagatcaatggggagaaatactgcggagagaggtcccagttcgtcgtcaccagcaacagcaacaagatcacagttcgcttccactcagatcagtcctacaccgacaccggcttcttagctgaatacctctcctacgactccagtgacccatgcccggggcagttcacgtgccgcacggggcggtgtatccggaaggagctgcgctgtgatggctgggccgactgcaccgaccacagcgatgagctcaactgcagttgcgacgccggccaccagttcacgtgcaagaacaagttctgcaagcccctcttctgggtctgcgacagtgtgaacgactgcggagacaacagcgacgagcaggggtgcagttgtccggcccagaccttcaggtgttccaatgggaagtgcctctcgaaaagccagcagtgcaatgggaaggacgactgtggggacgggtccgacgaggcctcctgccccaaggtgaacgtcgtcacttgtaccaaacacacctaccgctgcctcaatgggctctgcttgagcaagggcaaccctgagtgtgacgggaaggaggactgtagcgacggctcagatgagaaggactgcgactgtgggctgcggtcattcacgagacaggctcgtgttgttgggggcacggatgcggatgagggcgagtggccctggcaggtaagcctgcatgctctgggccagggccacatctgcggtgcttccctcatctctcccaactggctggtctctgccgcacactgctacatcgatgacagaggattcaggtactcagaccccacgcagtggacggccttcctgggcttgcacgaccagagccagcgcagcgcccctggggtgcaggagcgcaggctcaagcgcatcatctcccaccccttcttcaatgacttcaccttcgactatgacatcgcgctgctggagctggagaaaccggcagagtacagctccatggtgcggcccatctgcctgccggacgcctcccatgtcttccctgccggcaaggccatctgggtcacgggctggggacacacccagtatggaggcactggcgcgctgatcctgcaaaagggtgagatccgcgtcatcaaccagaccacctgcgagaacctcctgccgcagcagatcacgccgcgcatgatgtgcgtgggcttcctcagcggcggcgtggactcctgcaagggtgattccgggggacccctgtccagcgtggaggcggatgggcggatcttccaggccggtgtggtgagctggggagacggctgcgctcagaggaacaagccaggcgtgtacacaaggctccctctgtttcgggactggatcaaagagaacactggggtataggggccggggccacccaaatgtgtacacctgcggggccacccatcgtccaccccagtgtgcacgcctgcaggctggagactggaccgctgactgcaccagcgcccccagaacatacactgtgaactcaatctccagggctccaaatctgcctagaaaacctctcgcttcctcagcctccaaagtggagctgggaggtagaaggggaggacactggtggttctactgacccaactgggggcaaaggtttgaagacacagcctcccccgccagccccaagctgggccgaggcgcgtttgtgtatatctgcctcccctgtctgtaaggagcagcgggaacggagcttcggagcctcctcagtgaaggtggtggggctgccggatctgggctgtggggcccttgggccacgctcttgaggaagcccaggctcggaggaccctggaaaacagacgggtctgagactgaaaatggtttaccagctcccaggtgacttcagtgtgtgtattgtgtaaatgagtaaaacattttatttctttttaaaaaaaaaaa

SEQ ID NO: 543 - DNA, 3149 bp, Homo sapiens
gacgcctgtgagacccgcgagcggcctcggggaccatggggagcgatcgggcccgcaagggcggagggggcccgaaggacttcggcgcgggactcaagtacaactcccggcacgagaaagtgaatggcttggaggaaggcgtggagttcctgccagtcaacaacgtcaagaaggtggaaaagcatggcccggggcgctgggtggtgctggcagccgtgctgatcggcctcctcttggtcttgctggggatcggcttcctggtgtggcatttgcagtaccgggacgtgcgtgtccagaaggtcttcaatggctacatgaggatcacaaatgagaattttgtggatgcctacgagaactccaactccactgagtttgtaagcctggccagcaaggtgaaggacgcgctgaagctgctgtacagcggagtcccattcctgggcccctaccacaaggagtcggctgtgacggccttcagcgagggcagcgtcatcgcctactactggtctgagttcagcatcccgcagcacctggtggaggaggccgagcgcgtcatggccgaggagcgcgtagtcatgctgcccccgcgggcgcgctccctgaagtcctttgtggtcacctcagtggtggctttccccacggactccaaaacagtacagaggacccaggacaacagctgcagctttggcctgcacgcccgcggtgtggagctgatgcgcttcaccacgcccggcttccctgacagcccctaccccgctcatgcccgctgccagtgggccctgcggggggacgccgactcagtgctgagcctcaccttccgcagctttgaccttgcgtcctgcgacgagcgcggcagcgacctggtgacggtgtacaacaccctgagccccatggagccccacgccctggtgcagttgtgtggcacctaccctccctcctacaacctgaccttccactcctcccagaacgtcctgctcatcacactgataaccaacactgagcggcggcatcccggctttgaggccaccttcttccagctgcctaggatgagcagctgtggaggccgcttacgtaaagcccaggggacattcaacagcccctactacccaggccactacccacccaacattgactgcacatggaacattgaggtgcccaacaaccagcatgtgaaggtgcgcttcaaattcttctacctgctggagcccggcgtgcctgcgggcacctgccccaaggactacgtggagatcaatggggagaaatactgcggagagaggtcccagttcgtcgtcaccagcaacagcaacaagatcacagttcgcttccactcagatcagtcctacaccgacaccggcttcttagctgaatacctctcctacgactccagtgacccatgcccggggcagttcacgtgccgcacggggcggtgtatccggaaggagctgcgctgtgatggctgggccgactgcaccgaccacagcgatgagctcaactgcagttgcgacgccggccaccagttcacgtgcaagaacaagttctgcaagcccctcttctgggtctgcgacagtgtgaacgactgcggagacaacagcgacgagcaggggtgcagttgtccggcccagaccttcaggtgttccaatgggaagtgcctctcgaaaagccagcagtgcaatgggaaggacgactgtggggacgggtccgacgaggcctcctgccccaaggtgaacgtcgtcacttgtaccaaacacacctaccgctgcctcaatgggctctgcttgagcaagggcaaccctgagtgtgacgggaaggaggactgtagcgacggctcagatgagaaggactgcgactgtgggctgcggtcattcacgagacaggctcgtgttgttgggggcacggatgcggatgagggcgagtggccctggcaggtaagcctgcatgctctgggccagggccacatctgcggtgcttccctcatctctcccaactggctggtctctgccgcacactgctacatcgatgacagaggattcaggtactcagaccccacgcagtggacggccttcctgggcttgcacgaccagagccagcgcagcgcccctggggtgcaggagcgcaggctcaagcgcatcatctcccaccccttcttcaatgacttcaccttcgactatgacatcgcgctgctggagctggagaaaccggcagagtacagctccatggtgcggcccatctgcctgccggacgcctcccatgtcttccctgccggcaaggccatctgggtcacgggctggggacacacccagtatggaggcactggcgcgctgatcctgcaaaagggtgagatccgcgtcatcaaccagaccacctgcgagaacctcctgccgcagcagatcacgccgcgcatgatgtgcgtgggcttcctcagcggcggcgtggactcctgctatggtgattccgggggacccctgtccagcgtggaggcggatgggcggatcttccaggccggtgtggtgagctggggagacggctgcgctcagaggaacaagccaggcgtgtacacaaggctccctctgtttcgggactggatcaaagagaacactggggtataggggccggggccacccaaatgtgtacacctgcggggccacccatcgtccaccccagtgtgcacgcctgcaggctggagactggaccgctgactgcaccagcgcccccagaacatacactgtgaactcaatctccagggctccaaatctgcctagaaaacctctcgcttcctcagcctccaaagtggagctgggaggtagaaggggaggacactggtggttctactgacccaactgggggcaaaggtttgaagacacagcctcccccgccagccccaagctgggccgaggcgcgtttgtgtatatctgcctcccctgtctgtaaggagcagcgggaacggagcttcggagcctcctcagtgaaggtggtggggctgccggatctgggctgtggggcccttgggccacgctcttgaggaagcccaggctcggaggaccctggaaaacagacgggtctgagactgaaaatggtttaccagctcccaggtgacttcagtgtgtgtattgtgtaaatgagtaaaacattttatttctttttaaaaaaaaaaa

SEQ ID NO: 544 - protein, 99 aa, Unknown [sequence omitted]

SEQ ID NO: 545 - protein, 124 aa, Unknown
  Rous sarcoma virus retropepsin
LAMTMEHKDRPLVRVILTNTGSHPVKQRSVYITALLDSGADITIISEEDWPTDWPVMEAANPQIHGIGGGIPMRKSRDMIELGVINRDGSLERPLLLFPAVAMVRGSILGRDCLQGLGLRLTNL

SEQ ID NO: 546 - DNA, 1801 bp, Homo sapiens
gcaaggcatagagacaacatagagctaagtaaagccagtggaaatgaagagtcttccaatcctactgttgctgtgcgtggcagtttgctcagcctatccattggatggagctgcaaggggtgaggacaccagcatgaaccttgttcagaaatatctagaaaactactacgacctcaaaaaagatgtgaaacagtttgttaggagaaaggacagtggtcctgttgttaaaaaaatccgagaaatgcagaagttccttggattggaggtgacggggaagctggactccgacactctggaggtgatgcgcaagcccaggtgtggagttcctgatgttggtcacttcagaacctttcctggcatcccgaagtggaggaaaacccaccttacatacaggattgtgaattatacaccagatttgccaaaagatgctgttgattctgctgttgagaaagctctgaaagtctgggaagaggtgactccactcacattctccaggctgtatgaaggagaggctgatataatgatctcttttgcagttagagaacatggagacttttacccttttgatggacctggaaatgttttggcccatgcctatgcccctgggccagggattaatggagatgcccactttgatgatgatgaacaatggacaaaggatacaacagggaccaatttatttctcgttgctgctcatgaaattggccactccctgggtctctttcactcagccaacactgaagctttgatgtacccactctatcactcactcacagacctgactcggttccgcctgtctcaagatgatataaatggcattcagtccctctatggacctccccctgactcccctgagacccccctggtacccacggaacctgtccctccagaacctgggacgccagccaactgtgatcctgctttgtcctttgatgctgtcagcactctgaggggagaaatcctgatctttaaagacaggcacttttggcgcaaatccctcaggaagcttgaacctgaattgcatttgatctcttcattttggccatctcttccttcaggcgtggatgccgcatatgaagttactagcaaggacctcgttttcatttttaaaggaaatcaattctgggccatcagaggaaatgaggtacgagctggatacccaagaggcatccacaccctaggtttccctccaaccgtgaggaaaatcgatgcagccatttctgataaggaaaagaacaaaacatatttctttgtagaggacaaatactggagatttgatgagaagagaaattccatggagccaggctttcccaagcaaatagctgaagactttccagggattgactcaaagattgatgctgtttttgaagaatttgggttcttttatttctttactggatcttcacagttggagtttgacccaaatgcaaagaaagtgacacacactttgaagagtaacagctggcttaattgttgaaagagatatgtagaaggcacaatatgggcactttaaatgaagctaataattcttcacctaagtctctgtgaattgaaatgttcgttttctcctgcctgtgctgtgactcgagtcacactcaagggaacttgagcgtgaatctgtatcttgccggtcatttttatgttattacagggcattcaaatgggctgctgcttagcttgcaccttgtcacatagagtgatctttcccaagagaaggggaagcactcgtgtgcaacagacaagtgactgtatctgtgtagactatttgcttatttaataaagacgatttgtcagttgtttt

SEQ ID NO: 547 - protein, 477 aa, Homo sapiens
MKSLPILLLLCVAVCSAYPLDGAARGEDTSMNLVQKYLENYYDLKKDVKQFVRRKDSGPVVKKIREMQKFLGLEVTGKLDSDTLEVMRKPRCGVPDVGHFRTFPGIPKWRKTHLTYRIVNYTPDLPKDAVDSAVEKALKVWEEVTPLTFSRLYEGEADIMISFAVREHGDFYPFDGPGNVLAHAYAPGPGINGDAHFDDDEQWTKDTTGTNLFLVAAHEIGHSLGLFHSANTEALMYPLYHSLTDLTRFRLSQDDINGIQSLYGPPPDSPETPLVPTEPVPPEPGTPANCDPALSFDAVSTLRGEILIFKDRHFWRKSLRKLEPELHLISSFWPSLPSGVDAAYEVTSKDLVFIFKGNQFWAIRGNEVRAGYPRGIHTLGFPPTVRKIDAAISDKEKNKTYFFVEDKYWRFDEKRNSMEPGFPKQIAEDFPGIDSKIDAVFEEFGFFYFFTGSSQLEFDPNAKKVTHTLKSNSWLNC

SEQ ID NO: 548 - DNA, 4111 bp, Homo sapiens
cggcagggttggaaaatgatggaagaggcggaggtggaggcgaccgagtgctgagaggaacctgcggaatcggccgagatggggtctggcgcgcgctttccctcggggacccttcgtgtccggtggttgctgttgcttggcctggtgggcccagtcctcggtgcggcgcggccaggctttcaacagacctcacatctttcttcttatgaaattataactccttggagattaactagagaaagaagagaagcccctaggccctattcaaaacaagtatcttatgttattcaggctgaaggaaaagagcatattattcacttggaaaggaacaaagaccttttgcctgaagattttgtggtttatacttacaacaaggaagggactttaatcactgaccatcccaatatacagaatcattgtcattatcggggctatgtggagggagttcataattcatccattgctcttagcgactgttttggactcagaggattgctgcatttagagaatgcgagttatgggattgaacccctgcagaacagctctcattttgagcacatcatttatcgaatggatgatgtctacaaagagcctctgaaatgtggagtttccaacaaggatatagagaaagaaactgcaaaggatgaagaggaagagcctcccagcatgactcagctacttcgaagaagaagagctgtcttgccacagacccggtatgtggagctgttcattgtcgtagacaaggaaaggtatgacatgatgggaagaaatcagactgctgtgagagaagagatgattctcctggcaaactacttggatagtatgtatattatgttaaatattcgaattgtgctagttggactggagatttggaccaatggaaacctgatcaacatagttgggggtgctggtgatgtgctggggaacttcgtgcagtggcgggaaaagtttcttatcacacgtcggagacatgacagtgcacagctagttctaaagaaaggttttggtggaactgcaggaatggcatttgtgggaacagtgtgttcaaggagccacgcaggcgggattaatgtgtttggacaaatcactgtggagacatttgcttccattgttgctcatgaattgggtcataatcttggaatgaatcacgatgatgggagagattgttcctgtggagcaaagagctgcatcatgaattcaggagcatcgggttccagaaactttagcagttgcagtgcagaggactttgagaagttaactttaaataaaggaggaaactgccttcttaatattccaaagcctgatgaagcctatagtgctccctcctgtggtaataagttggtggacgctggggaagagtgtgactgtggtactccaaaggaatgtgaattggacccttgctgcgaaggaagtacctgtaagcttaaatcatttgctgagtgtgcatatggtgactgttgtaaagactgtcggttccttccaggaggtactttatgccgaggaaaaaccagtgagtgtgatgttccagagtactgcaatggttcttctcagttctgtcagccagatgtttttattcagaatggatatccttgccagaataacaaagcctattgctacaacggcatgtgccagtattatgatgctcaatgtcaagtcatctttggctcaaaagccaaggctgcccccaaagattgtttcattgaagtgaattctaaaggtgacagatttggcaattgtggtttctctggcaatgaatacaagaagtgtgccactgggaatgctttgtgtggaaagcttcagtgtgagaatgtacaagagatacctgtatttggaattgtgcctgctattattcaaacgcctagtcgaggcaccaaatgttggggtgtggatttccagctaggatcagatgttccagatcctgggatggttaacgaaggcacaaaatgtggtgctggaaagatctgtagaaacttccagtgtgtagatgcttctgttctgaattatgactgtgatgttcagaaaaagtgtcatggacatggggtatgtaatagcaataagaattgtcactgtgaaaatggctgggctcccccaaattgtgagactaaaggatacggaggaagtgtggacagtggacctacatacaatgaaatgaatactgcattgagggacggacttctggtcttcttcttcctaattgttccccttattgtctgtgctatttttatcttcatcaagagggatcaactgtggagaagctacttcagaaagaagagatcacaaacatatgagtcagatggcaaaaatcaagcaaacccttctagacagccggggagtgttcctcgacatgtttctccagtgacacctcccagagaagttcctatatatgcaaacagatttgcagtaccaacctatgcagccaagcaacctcagcagttcccatcaaggccacctccaccacaaccgaaagtatcatctcagggaaacttaattcctgcccgtcctgctcctgcacctcctttatatagttccctcacttgatttttttaaccttctttttgcaaatgtcttcagggaactgagctaatactttttttttttcttgatgttttcttgaaaagcctttctgttgcaactatgaatgaaaacaaaacaccacaaaacagacttcactaacacagaaaaacagaaactgagtgtgagagttgtgaaatacaaggaaatgcagtaaagccagggaatttacaataacatttccgtttccatcattgaataagtcttattcagtcatcggtgaggttaatgcactaatcatggattttttgaacatgttattgcagtgattctcaaattaactgtattggtgtaagatttttgtcattaagtgtttaagtgttattctgaattttctaccttagttatcattaatgtagttcctcattgaacatgtgataatctaatacctgtgaaaactgactaatcagctgccaataatatctaatatttttcatcatgcacgaattaataatcatcatactctagaatcttgtctgtcactcactacatgaataagcaaatattgtcttcaaaagaatgcacaagaaccacaattaagatgtcatattattttgaaagtacaaaatatactaaaagagtgtgtgtgtattcacgcagttactcgcttccatttttatgacctttcaactataggtaataactcttagagaaattaatttaatattagaatttctattatgaatcatgtgaaagcatgacattcgttcacaatagcactattttaaataaattataagctttaaggtacgaagtatttaatagatctaatcaaatatgttgattcatggctataataaagcaggagcaattataaaatcttcaatcaattgaacttttacaaaaccacttgagaatttcatgagcactttaaaatctgaactttcaaagcttgctattaaatcatttagaatgtttacatttactaaggtgtgctgggtcatgtaaaatattagacactaatattttcatagaaattaggctggagaaagaaggaagaaatggttttcttaaatacctacaaaaaagttactgtggtatctatgagttatcatcttagctgtgttaaaaatgaatttttactatggcagatatggtatggatcgtaaaattttaagcactaaaaattttttcataacctttcataataaagtttaataataggtttattaactgaatttcattagttttttaaaagtgtttttggtttgtgtatatatacatatacaaatacaacatttacaataaataaaatacttgaaattctcttttgtgtctcctagtagcttcctactcaactatttataatctcattaattaaaaagttataattttagataaaaattctagtcaaatttttacagatattatctcactaattttcagacttttgccaaagtgtgcacaatggctttttgttaataaagaacagattagttttgaagaaggcaaaaatttcagttttctgaagacagcatgttattttaacaatcaagtatacatattaaaaattgtgagcaatctcaaaaaaaaaaaaaaa

SEQ ID NO: 549 - protein, 819 aa, Homo sapiens
MGSGARFPSGTLRVRWLLLLGLVGPVLGAARPGFQQTSHLSSYEIITPWRLTRERREAPRPYSKQVSYVIQAEGKEHIIHLERNKDLLPEDFVVYTYNKEGTLITDHPNIQNHCHYRGYVEGVHNSSIALSDCFGLRGLLHLENASYGIEPLQNSSHFEHIIYRMDDVYKEPLKCGVSNKDIEKETAKDEEEEPPSMTQLLRRRRAVLPQTRYVELFIVVDKERYDMMGRNQTAVREEMILLANYLDSMYIMLNIRIVLVGLEIWTNGNLINIVGGAGDVLGNFVQWREKFLITRRRHDSAQLVLKKGFGGTAGMAFVGTVCSRSHAGGINVFGQITVETFASIVAHELGHNLGMNHDDGRDCSCGAKSCIMNSGASGSRNFSSCSAEDFEKLTLNKGGNCLLNIPKPDEAYSAPSCGNKLVDAGEECDCGTPKECELDPCCEGSTCKLKSFAECAYGDCCKDCRFLPGGTLCRGKTSECDVPEYCNGSSQFCQPDVFIQNGYPCQNNKAYCYNGMCQYYDAQCQVIFGSKAKAAPKDCFIEVNSKGDRFGNCGFSGNEYKKCATGNALCGKLQCENVQEIPVFGIVPAIIQTPSRGTKCWGVDFQLGSDVPDPGMVNEGTKCGAGKICRNFQCVDASVLNYDCDVQKKCHGHGVCNSNKNCHCENGWAPPNCETKGYGGSVDSGPTYNEMNTALRDGLLVFFFLIVPLIVCAIFIFIKRDQLWRSYFRKKRSQTYESDGKNQANPSRQPGSVPRHVSPVTPPREVPIYANRFAVPTYAAKQPQQFPSRPPPPQPKVSSQGNLIPARPAPAPPLYSSLT

SEQ ID NO: 550 - DNA, 3927 bp, Homo sapiens
gcggcggcaggcctagcagcacgggaaccgtcccccgcgcgcatgcgcgcgcccctgaagcgcctgggggacgggtatgggcgggaggtaggggcgcggctccgcgtgccagttgggtgcccgcgcgtcacgtggtgaggaaggaggcggaggtctgagtttcgaaggagggggggagagaagagggaacgagcaagggaaggaaagcggggaaaggaggaaggaaacgaacgagggggagggaggtccctgttttggaggagctaggagcgttgccggcccctgaagtggagcgagagggaggtgcttcgccgtttctcctgccaggggaggtcccggcttcccgtggaggctccggaccaagccccttcagcttctccctccggatcgatgtgctgctgttaacccgtgaggaggcggcggcggcggcagcggcagcggaagatggtgttgctgagagtgttaattctgctcctctcctgggcggcggggatgggaggtcagtatgggaatcctttaaataaatatatcagacattatgaaggattatcttacaatgtggattcattacaccaaaaacaccagcgtgccaaaagagcagtctcacatgaagaccaatttttacgtctagatttccatgcccatggaagacatttcaacctacgaatgaagagggacacttcccttttcagtgatgaatttaaagtagaaacatcaaataaagtacttgattatgatacctctcatatttacactggacatatttatggtgaagaaggaagttttagccatgggtctgttattgatggaagatttgaaggattcatccagactcgtggtggcacattttatgttgagccagcagagagatatattaaagaccgaactctgccatttcactctgtcatttatcatgaagatgatattaactatccccataaatacggtcctcaggggggctgtgcagatcattcagtatttgaaagaatgaggaaataccagatgactggtgtagaggaagtaacacagatacctcaagaagaacatgctgctaatggtccagaacttctgaggaaaaaacgtacaacttcagctgaaaaaaatacttgtcagctttatattcagactgatcatttgttctttaaatattacggaacacgagaagctgtgattgcccagatatccagtcatgttaaagcgattgatacaatttaccagaccacagacttctccggaatccgtaacatcagtttcatggtgaaacgcataagaatcaatacaactgctgatgagaaggaccctacaaatcctttccgtttcccaaatattggtgtggagaagtttctggaattgaattctgagcagaatcatgatgactactgtttggcctatgtcttcacagaccgagattttgatgatggcgtacttggtctggcttgggttggagcaccttcaggaagctctggaggaatatgtgaaaaaagtaaactctattcagatggtaagaagaagtccttaaacactggaattattactgttcagaactatgggtctcatgtacctcccaaagtctctcacattacttttgctcacgaagttggacataactttggatccccacatgattctggaacagagtgcacaccaggagaatctaagaatttgggtcaaaaagaaaatggcaattacatcatgtatgcaagagcaacatctggggacaaacttaacaacaataaattctcactctgtagtattagaaatataagccaagttcttgagaagaagagaaacaactgttttgttgaatctggccaacctatttgtggaaatggaatggtagaacaaggtgaagaatgtgattgtggctatagtgaccagtgtaaagatgaatgctgcttcgatgcaaatcaaccagagggaagaaaatgcaaactgaaacctgggaaacagtgcagtccaagtcaaggtccttgttgtacagcacagtgtgcattcaagtcaaagtctgagaagtgtcgggatgattcagactgtgcaagggaaggaatatgtaatggcttcacagctctctgcccagcatctgaccctaaaccaaacttcacagactgtaataggcatacacaagtgtgcattaatgggcaatgtgcaggttctatctgtgagaaatatggcttagaggagtgtacgtgtgccagttctgatggcaaagatgataaagaattatgccatgtatgctgtatgaagaaaatggacccatcaacttgtgccagtacagggtctgtgcagtggagtaggcacttcagtggtcgaaccatcaccctgcaacctggatccccttgcaacgattttagaggttactgtgatgttttcatgcggtgcagattagtagatgctgatggtcctctagctaggcttaaaaaagcaatttttagtccagagctctatgaaaacattgctgaatggattgtggctcattggtgggcagtattacttatgggaattgctctgatcatgctaatggctggatttattaagatatgcagtgttcatactccaagtagtaatccaaagttgcctcctcctaaaccacttccaggcactttaaagaggaggagacctccacagcccattcagcaaccccagcgtcagcggccccgagagagttatcaaatgggacacatgagacgctaactgcagcttttgccttggttcttcctagtgcctacaatgggaaaacttcactccaaagagaaacctattaagtcatcatctccaaactaaaccctcacaagtaacagttgaagaaaaaatggcaagagatcatatcctcagaccaggtggaattacttaaattttaaagcctgaaaattccaatttgggggtgggaggtggaaaaggaacccaattttcttatgaacagatatttttaacttaatggcacaaagtcttagaatattattatgtgccccgtgttccctgttcttcgttgctgcattttcttcacttgcaggcaaacttggctctcaataaacttttaccacaaattgaaataaatatatttttttcaactgccaatcaaggctaggaggctcgaccacctcaacattggagacatcacttgccaatgtacataccttgttatatgcagacatgtatttcttacgtacactgtacttctgtgtgcaattgtaaacagaaattgcaatatggatgtttctttgtattataaaatttttccgctcttaattaaaaattactgtttaattgacatactcaggataacagagaatggtggtattcagtggtccaggattctgtaatgctttacacaggcagttttgaaatgaaaatcaatttacctttctgttacgatggagttggttttgatactcattttttctttatcacatggctgctacgggcacaagtgactatactgaagaacacagttaagtgttgtgcaaactggacatagcagcacatactacttcagagttcatgatgtagatgtctggtttctgcttacgtcttttaaactttctaattcaattccatttttcaattaataggtgaaattttattcatgctttgatagaaattatgtcaatgaaatgattctttttatttgtagcctacttatttgtgtttttcatatatctgaaatatgctaattatgttttctgtctgatatggaaaagaaaagctgtgtctttatcaaaatatttaaacggttttttcagcatatcatcactgatcattggtaaccactaaagatgagtaatttgcttaagtagtagttaaaattgtagataggccttctgacattttttttcctaaaatttttaacagcattgaaggtgaaacagcacaatgtcccattccaaatttatttttgaaacagatgtaaataattggcattttaaagag

SEQ ID NO: 551 - protein, 748 aa, Homo sapiens
MVLLRVLILLLSWAAGMGGQYGNPLNKYIRHYEGLSYNVDSLHQKHQRAKRAVSHEDQFLRLDFHAHGRHFNLRMKRDTSLFSDEFKVETSNKVLDYDTSHIYTGHIYGEEGSFSHGSVIDGRFEGFIQTRGGTFYVEPAERYIKDRTLPFHSVIYHEDDINYPHKYGPQGGCADHSVFERMRKYQMTGVEEVTQIPQEEHAANGPELLRKKRTTSAEKNTCQLYIQTDHLFFKYYGTREAVIAQISSHVKAIDTIYQTTDFSGIRNISFMVKRIRINTTADEKDPTNPFRFPNIGVEKFLELNSEQNHDDYCLAYVFTDRDFDDGVLGLAWVGAPSGSSGGICEKSKLYSDGKKKSLNTGIITVQNYGSHVPPKVSHITFAHEVGHNFGSPHDSGTECTPGESKNLGQKENGNYIMYARATSGDKLNNNKFSLCSIRNISQVLEKKRNNCFVESGQPICGNGMVEQGEECDCGYSDQCKDECCFDANQPEGRKCKLKPGKQCSPSQGPCCTAQCAFKSKSEKCRDDSDCAREGICNGFTALCPASDPKPNFTDCNRHTQVCINGQCAGSICEKYGLEECTCASSDGKDDKELCHVCCMKKMDPSTCASTGSVQWSRHFSGRTITLQPGSPCNDFRGYCDVFMRCRLVDADGPLARLKKAIFSPELYENIAEWIVAHWWAVLLMGIALIMLMAGFIKICSVHTPSSNPKLPPPKPLPGTLKRRRPPQPIQQPQRQRPRESYQMGHMRR

SEQ ID NO: 552 - protein, 241 aa, Homo sapiens
  Mutant MT-SP1 sequence; protease domain
  CB0252
VVGGTDADEGEWPWQVSLHALGQGHICGASLISPNWLVSAAHCYIDDRGFRYSDPTQWTAFLGLHDQSQRSAPGVQERRLKRIISHPFFNDFTFDYDIALLELEKPAEYSSMVRPICLPDASHVFPAGKAIWVTGWGHTQEGGTGALILQKGEIRVINQTTCENLLPQQITPRMMCVGFLSGGVDSCQGDSGGPLSSVEADGRIFQAGVVSWGDGCAQRNNPGVYTRLPLFRDWIKENTGV

SEQ ID NO: 553 - protein, 241 aa, Homo sapiens
  Mutant MT-SP1 sequence; protease domain
  CB0486
VVGGTDADEGEWPWQVSLHALGQGHTCGASLISPNWLVSAAHCYIDDRGFRYSDPTQWTAFLGLHDQSQRSAPGVQERRLKRIISHPFFNDFTFDYDIALLELEKPAEYSSMVRPICLPDASHVFPAGKAIWVTGWGHTQEGGTGALILQKGEIRVINQTTCENLLPQDITPRMMCVGFLSGGVDSCQGDSGGPLSSVEADGRIFQAGVVSWGDGCAQRNRPGVYTRLPLFRDWIKENTGV

SEQ ID NO: 554 - protein, 241 aa, Homo sapiens
  Mutant MT-SP1 sequence; protease domain
  CB0351
VVGGTDADEGEWPWQVSLHALGQGHTCGASLISPNWLVSAAHCYIDDRGFRYSDPTQWTAFLGLHDQSQRSAPGVQERRLKRIISHPFFNDFTFDYDIALLELEKPAEYSSMVRPICLPDASHVFPAGKAIWVTGWGHTQDGGTGALILQKGEIRVINQTTCENLLPQQITPRMMCVGFLSGGVDSCQGDSGGPLSSVEADGRIFQAGVVSWGDGCAQRNFPGVYTRLPLFRDWIKENTGV

SEQ ID NO: 555 - protein, 242 aa, Homo sapiens
  Mutant MT-SP1 sequence; protease domain
  CB0422
VVGGTDADEGEWPWQVSLHALGQGHTCGASLISPNWLVSAAHCYIDDRGFRYSDPTQWTAFLGLHDQSQRSAPGVQERRLKRIISHPFFNDFTFDYDIALLELEKPAEYSSMVRPICLPDASHVFPAGKAIWVTGWGHTQYEGGTGALILQKGEIRVINQTTCENLLPQDITPRMMCVGFLSGGVDSCQGDSGGPLSSVEADGRIFQAGVVSWGDGCAQRNNPGVYTRLPLFRDWIKENTGV

SEQ ID NO: 556 - protein, 241 aa, Homo sapiens
  Mutant MT-SP1 sequence; protease domain
  CB0489
VVGGTDADEGEWPWQVSLHALGQGHTCGASLISPNWLVSAAHCYIDDRGFRYSDPTQWTAFLGLHDQSQRSAPGVQERRLKRIISHPFFNDFTFDYDIALLELEKPAEYSSMVRPICLPDASHVFPAGKAIWVTGWGHTQEGGTLALILQKGEIRVINQTTCENLLPQDITPRMMCVGFLSGGVDSCQGDSGGPLSSVEADGRIFQAGVVSWGDGCAQRNLPGVYTRLPLFRDWIKENTGV

SEQ ID NO: 557 - protein, 241 aa, Homo sapiens
  Mutant MT-SP1 sequence; protease domain
  CB0464
VVGGTDADEGEWPWQVSLHALGQGHICGASLISPNWLVSAAHCYIDDRGFRYSDPTQWTAFLGLHDQSQRSAPGVQERRLKRIISHPFFNDFTFDYDIALLELEKPAEYSSMVRPICLPDASHVFPAGKAIWVTGWGHTQEGGTGALILQKGEIRVINQTTCENLLPEFITPRMMCVGFLSGGVDSCQGDSGGPLSSVEADGRIFQAGVVSWGDGCAQRNKPGVYTRLPLFRDWIKENTGV

SEQ ID NO: 558 - protein, 241 aa, Homo sapiens
  Mutant MT-SP1 sequence; protease domain
  CB0490
VVGGTDADEGEWPWQVSLHALGQGHTCGASLISPNWLVSAAHCYIDDRGFRYSDPTQWTAFLGLHDQSQRSAPGVQERRLKRIISHPFFNDFTFDYDIALLELEKPAEYSSMVRPICLPDASHVFPAGKAIWVTGWGHTQEGGTLALILQKGEIRVINQTTCENLLPQDITPRMMCVGFLSGGVDSCQGDSGGPLSSVEADGRIFQAGVVSWGDGCAQRNRPGVYTRLPLFRDWIKENTGV

SEQ ID NO: 559 - protein, 241 aa, Homo sapiens
  Mutant MT-SP1 sequence; protease domain
  CB0487
VVGGTDADEGEWPWQVSLHALGQGHTCGASLISPNWLVSAAHCYIDDRGFRYSDPTQWTAFLGLHDQSQRSAPGVQERRLKRIISHPFFNDFTFDYDIALLELEKPAEYSSMVRPICLPDASHVFPAGKAIWVTGWGHTQEGGTLALILQKGEIRVINQTTCENLLPQDITPRMMCVGFLSGGVDSCQGDSGGPLSSVEADGRIFQAGVVSWGDGCAQRNNPGVYTRLPLFRDWIKENTGV

SEQ ID NO: 560 - protein, 241 aa, Homo sapiens
  Mutant MT-SP1 sequence; protease domain
  CB0268
VVGGTDADEGEWPWQVSLHALGQGHICGASLISPNWLVSAAHCYIDDRGFRYSDPTQWTAFLGLHDQSQRSAPGVQERRLKRIISHPFFNDFTFDYDIALLELEKPAEYSSMVRPICLPDASHVFPAGKAIWVTGWGHTQYGGTGALILQKGEIRVINQTTCENLLPQQITPRMMCVGFLSGGVDSCQGDSGGPLSSVEADGRIFQAGVVSWGDGCADRNKPGVYTRLPLFRDWIKENTGV

SEQ ID NO: 561 - protein, 241 aa, Homo sapiens
  Mutant MT-SP1 sequence; protease domain
  CB0251
VVGGTDADEGEWPWQVSLHALGQGHICGASLISPNWLVSAAHCYIDDRGFRYSDPTQWTAFLGLHDQSQRSAPGVQERRLKRIISHPFFNDFTFDYDIALLELEKPAEYSSMVRPICLPDASHVFPAGKAIWVTGWGHTQEGGTGALILQKGEIRVINQTTCENLLPQQITPRMMCVGFLSGGVDSCQGDSGGPLSSVEADGRIFQAGVVSWGDGCAQRNRPGVYTRLPLFRDWIKENTGV

SEQ ID NO: 562 - protein, 241 aa, Homo sapiens
  Mutant MT-SP1 sequence; protease domain
  CB0377
VVGGTDADEGEWPWQVSLHALGQGHICGASLISPNWLVSAAHCYIDDRGFRYSDPTQWTAFLGLHDQSQRSAPGVQERRLKRIISHPFFNDFTFDYDIALLELEKPAEYSSMVRPICLPDASHVFPAGKAIWVTGWGHTQEGGTGALILQKGEIRVINQTTCENLLPQDITPRMMCVGFLSGGVDSCQGDSGGPLSSVEADGRIFQAGVVSWGDGCAQRNNPGVYTRLPLFRDWIKENTGV

SEQ ID NO: 563 - protein, 241 aa, Homo sapiens
  Mutant MT-SP1 sequence; protease domain
  CB0244
VVGGTDADEGEWPWQVSLHALGQGHICGASLISPNWLVSAAHCYIDDRGFRYSDPTQWTAFLGLHDQSQRSAPGVQERRLKRIISHPFFNDFTFDYDIALLELEKPAEYSSMVRPICLPDASHVFPAGKAIWVTGWGHTQDGGTGALILQKGEIRVINQTTCENLLPQQITPRMMCVGFLSGGVDSCQGDSGGPLSSVEADGRIFQAGVVSWGDGCAQRNRPGVYTRLPLFRDWIKENTGV

SEQ ID NO: 564 - protein, 241 aa, Homo sapiens
  Mutant MT-SP1 sequence; protease domain
  CB0488
VVGGTDADEGEWPWQVSLHALGQGHTCGASLISPNWLVSAAHCYIDDRGFRYSDPTQWTAFLGLHDQSQRSAPGVQERRLKRIISHPFFNDFTFDYDIALLELEKPAEYSSMVRPICLPDASHVFPAGKAIWVTGWGHTQEGGTLALILQKGEIRVINQTTCENLLPQDITPRMMCVGFLSGGVDSCQGDSGGPLSSVEADGRIFQAGVVSWGDGCAQRNFPGVYTRLPLFRDWIKENTGV

SEQ ID NO: 565 - protein, 241 aa, Homo sapiens
  Mutant MT-SP1 sequence; protease domain
  CB0373
VVGGTDADEGEWPWQVSLHALGQGHICGASLISPNWLVSAAHCYIDDRGFRYSDPTQWTAFLGLHDQSQRSAPGVQERRLKRIISHPFFNDFTFDYDIALLELEKPAEYSSMVRPICLPDASHVFPAGKAIWVTGWGHTQEGGTGALILQKGEIRVINQTTCENLLPQDITPRMMCVGFLSGGVDSCQGDSGGPLSSVEADGRIFQAGVVSWGDGCAQRNRPGVYTRLPLFRDWIKENTGV

SEQ ID NO: 566 - protein, 241 aa, Homo sapiens
  Mutant MT-SP1 sequence; protease domain
  CB0232
VVGGTDADEGEWPWQVSLHALGQGHICGASLISPNWLVSAAHCYIDDRGFRYSDPTQWTAFLGLHDQSQRSAPGVQERRLKRIISHPFFNDFTFDYDIALLELEKPAEYSSMVRPICLPDASHVFPAGKAIWVTGWGHTQEGGTGALILQKGEIRVINQTTCENLLPQQITPRMMCVGFLSGGVDSCQGDSGGPLSSVEADGRIFQAGVVSWGDGCAQRNLPGVYTRLPLFRDWIKENTGV

SEQ ID NO: 567 - protein, 241 aa, Homo sapiens
  Mutant MT-SP1 sequence; protease domain
  CB0082
VVGGTDADEGEWPWQVSLHALGQGHICGASLISPNWLVSAAHCYIDDWGFRYSDPTQWTAFLGLHDQSQRSAPGVQERRLKRIISHPFFNDFTFDYDIALLELEKPAEYSSMVRPICLPDASHVFPAGKAIWVTGWGHTQYGGTGALILQKGEIRVINQTTCENLLPQQITPRMMCVGFLSGGVDSCQGDSGGPLSSVEADGRIFQAGVVSWGDGCAQRNKPGVYTRLPLFRDWIKENTGV

SEQ ID NO: 568 - protein, 241 aa, Homo sapiens
  Mutant MT-SP1 sequence; protease domain
  CB0274
VVGGTDADEGEWPWQVSLHALGQGHICGASLISPNWLVSAAHCYIDDRGFRYSDPTQWTAFLGLHDQSQRSAPGVQERRLKRIISHPFFNDFTFDYDIALLELEKPAEYSSMVRPICLPDASHVFPAGKAIWVTGWGHTQYEGTGALILQKGEIRVINQTTCENLLPQQITPRMMCVGFLSGGVDSCQGDSGGPLSSVEADGRIFQAGVVSWGDGCAQRNKPGVYTRLPLFRDWIKENTGV

SEQ ID NO: 569 - protein, 241 aa, Homo sapiens
  Mutant MT-SP1 sequence; protease domain
  CB0080
VVGGTDADEGEWPWQVSLHALGQGHICGASLISPNWLVSAAHCYIDDDGFRYSDPTQWTAFLGLHDQSQRSAPGVQERRLKRIISHPFFNDFTFDYDIALLELEKPAEYSSMVRPICLPDASHVFPAGKAIWVTGWGHTQYGGTGALILQKGEIRVINQTTCENLLPQQITPRMMCVGFLSGGVDSCQGDSGGPLSSVEADGRIFQAGVVSWGDGCAQRNKPGVYTRLPLFRDWIKENTGV

SEQ ID NO: 570 - protein, 241 aa, Homo sapiens
  Mutant MT-SP1 sequence; protease domain
  CB0367
VVGGTDADEGEWPWQVSLHALGQGHICGASLISPNWLVSAAHCYIDDRGFRYSDPTQWTAFLGLHDQSQRSAPGVQERRLKRIISHPFFNDFTFDYDIALLELEKPAEYSSMVRPICLPDASHVFPAGKAIWVTGWGHTQDGGTGALILQKGEIRVINQTTCENLLPQDITPRMMCVGFLSGGVDSCQGDSGGPLSSVEADGRIFQAGVVSWGDGCAQRNRPGVYTRLPLFRDWIKENTGV

SEQ ID NO: 571 - protein, 241 aa, Homo sapiens
  Mutant MT-SP1 sequence; protease domain
  CB0383
VVGGTDADEGEWPWQVSLHALGQGHICGASLISPNWLVSAAHCYIDDRGFRYSDPTQWTAFLGLHDQSQRSAPGVQERRLKRIISHPFFNDFTFDYDIALLELEKPAEYSSMVRPICLPDASHVFPAGKAIWVTGWGHTQDGGTGALILQKGEIRVINQTTCENLLPQLITPRMMCVGFLSGGVDSCQGDSGGPLSSVEADGRIFQAGVVSWGDGCAQRNLPGVYTRLPLFRDWIKENTGV

SEQ ID NO: 572 - protein, 241 aa, Homo sapiens
  Mutant MT-SP1 sequence; protease domain
  CB0357
VVGGTDADEGEWPWQVSLHALGQGHTCGASLISPNWLVSAAHCYIDDRGFRYSDPTQWTAFLGLHDQSQRSAPGVQERRLKRIISHPFFNDFTFDYDIALLELEKPAEYSSMVRPICLPDASHVFPAGKAIWVTGWGHTQDGGTGALILQKGEIRVINQTTCENLLPQQITPRMMCVGFLSGGVDSCQGDSGGPLSSVEADGRIFQAGVVSWGDGCAQRNLPGVYTRLPLFRDWIKENTGV

SEQ ID NO: 573 - protein, 241 aa, Homo sapiens
  Mutant MT-SP1 sequence; protease domain
  CB0387
VVGGTDADEGEWPWQVSLHALGQGHICGASLISPNWLVSAAHCYIDDRGFRYSDPTQWTAFLGLHDQSQRSAPGVQERRLKRIISHPFFNDFTFDYDIALLELEKPAEYSSMVRPICLPDASHVFPAGKAIWVTGWGHTQDGGTGALILQKGEIRVINQTTCENLLPQWITPRMMCVGFLSGGVDSCQGDSGGPLSSVEADGRIFQAGVVSWGDGCAQRNLPGVYTRLPLFRDWIKENTGV

SEQ ID NO: 574 - protein, 241 aa, Homo sapiens
  Mutant MT-SP1 sequence; protease domain
  CB0238
VVGGTDADEGEWPWQVSLHALGQGHICGASLISPNWLVSAAHCYIDDRGFRYSDPTQWTAFLGLHDQSQRSAPGVQERRLKRIISHPFFNDFTFDYDIALLELEKPAEYSSMVRPICLPDASHVFPAGKAIWVTGWGHTQDGGTGALILQKGEIRVINQTTCENLLPQQITPRMMCVGFLSGGVDSCQGDSGGPLSSVEADGRIFQAGVVSWGDGCAQRNLPGVYTRLPLFRDWIKENTGV

SEQ ID NO: 575 - protein, 241 aa, Homo sapiens
  Mutant MT-SP1 sequence; protease domain
  CB0458
VVGGTDADEGEWPWQVSLHALGQGHICGASLISPNWLVSAAHCYIDDRGFRYSDPTQWTAFLGLHDQSQRSAPGVQERRLKRIISHPFFNDFTFDYDIALLELEKPAEYSSMVRPICLPDASHVFPAGKAIWVTGWGHTQEGGTGALILQKGEIRVINQTTCENLLPQQITPRMMCVGFLSGGVDSCQGDSGGPLSSVEADGRIFQAGVVSWGDGCAERNRPGVYTRLPLFRDWIKENTGV

SEQ ID NO: 576 - protein, 241 aa, Homo sapiens
  Mutant MT-SP1 sequence; protease domain
  CB0235
VVGGTDADEGEWPWQVSLHALGQGHICGASLISPNWLVSAAHCYIDDRGFRYSDPTQWTAFLGLHDQSQRSAPGVQERRLKRIISHPFFNDFTFDYDIALLELEKPAEYSSMVRPICLPDASHVFPAGKAIWVTGWGHTQEGGTGALILQKGEIRVINQTTCENLLPQQITPRMMCVGFLSGGVDSCQGDSGGPLSSVEADGRIFQAGVVSWGDGCAQRNAPGVYTRLPLFRDWIKENTGV

SEQ ID NO: 577 - protein, 241 aa, Homo sapiens
  Mutant MT-SP1 sequence; protease domain
  CB0381
VVGGTDADEGEWPWQVSLHALGQGHICGASLISPNWLVSAAHCYIDDRGFRYSDPTQWTAFLGLHDQSQRSAPGVQERRLKRIISHPFFNDFTFDYDIALLELEKPAEYSSMVRPICLPDASHVFPAGKAIWVTGWGHTQDGGTGALILQKGEIRVINQTTCENLLPQHITPRMMCVGFLSGGVDSCQGDSGGPLSSVEADGRIFQAGVVSWGDGCAQRNLPGVYTRLPLFRDWIKENTGV

SEQ ID NO: 578 - protein, 241 aa, Homo sapiens
  Mutant MT-SP1 sequence; protease domain
  CB0388
VVGGTDADEGEWPWQVSLHALGQGHICGASLISPNWLVSAAHCYIDDRGFRYSDPTQWTAFLGLHDQSQRSAPGVQERRLKRIISHPFFNDFTFDYDIALLELEKPAEYSSMVRPICLPDASHVFPAGKAIWVTGWGHTQDGGTGALILQKGEIRVINQTTCENLLPQYITPRMMCVGFLSGGVDSCQGDSGGPLSSVEADGRIFQAGVVSWGDGCAQRNLPGVYTRLPLFRDWIKENTGV

SEQ ID NO: 579 - protein, 241 aa, Homo sapiens
  Mutant MT-SP1 sequence; protease domain
  CB0257
VVGGTDADEGEWPWQVSLHALGQGHICGASLISPNWLVSAAHCYIDDRGFRYSDPTQWTAFLGLHDQSQRSAPGVQERRLKRIISHPFFNDFTFDYDIALLELEKPAEYSSMVRPICLPDASHVFPAGKAIWVTGWGHTQEGGTGALILQKGEIRVINQTTCENLLPQQITPRMMCVGFLSGGVDSCQGDSGGPLSSVEADGRIFQAGVVSWGDGCAQRNYPGVYTRLPLFRDWIKENTGV

SEQ ID NO: 580 - protein, 241 aa, Homo sapiens
  Mutant MT-SP1 sequence; protease domain
  CB0385
VVGGTDADEGEWPWQVSLHALGQGHICGASLISPNWLVSAAHCYIDDRGFRYSDPTQWTAFLGLHDQSQRSAPGVQERRLKRIISHPFFNDFTFDYDIALLELEKPAEYSSMVRPICLPDASHVFPAGKAIWVTGWGHTQDGGTGALILQKGEIRVINQTTCENLLPQFITPRMMCVGFLSGGVDSCQGDSGGPLSSVEADGRIFQAGVVSWGDGCAQRNLPGVYTRLPLFRDWIKENTGV

SEQ ID NO: 581 - protein, 241 aa, Homo sapiens
  Mutant MT-SP1 sequence; protease domain
  CB0021
VVGGTDADEGEWPWQVSLHALGQGHICGASLISPNWLVSAAHCYIDDRGFRYSDPTQWTAFLGLHDQSQRSAPGVQERRLKRIISHPFFNDFTFDYDIALLELEKPAEYSSMVRPICLPDASHVFPAGKAIWVTGWGHTQYGGTGALILQKGEIRVINQTTCENLLPQEITPRMMCVGFLSGGVDSCQGDSGGPLSSVEADGRIFQAGVVSWGDGCAQRNKPGVYTRLPLFRDWIKENTGV

SEQ ID NO: 582 - protein, 241 aa, Homo sapiens
  Mutant MT-SP1 sequence; protease domain
  CB0020
VVGGTDADEGEWPWQVSLHALGQGHICGASLISPNWLVSAAHCYIDDRGFRYSDPTQWTAFLGLHDQSQRSAPGVQERRLKRIISHPFFNDFTFDYDIALLELEKPAEYSSMVRPICLPDASHVFPAGKAIWVTGWGHTQYGGTGALILQKGEIRVINQTTCENLLPQDITPRMMCVGFLSGGVDSCQGDSGGPLSSVEADGRIFQAGVVSWGDGCAQRNKPGVYTRLPLFRDWIKENTGV

SEQ ID NO: 583 - protein, 241 aa, Homo sapiens
  Mutant MT-SP1 sequence; protease domain
  CB0245
VVGGTDADEGEWPWQVSLHALGQGHICGASLISPNWLVSAAHCYIDDRGFRYSDPTQWTAFLGLHDQSQRSAPGVQERRLKRIISHPFFNDFTFDYDIALLELEKPAEYSSMVRPICLPDASHVFPAGKAIWVTGWGHTQDGGTGALILQKGEIRVINQTTCENLLPQQITPRMMCVGFLSGGVDSCQGDSGGPLSSVEADGRIFQAGVVSWGDGCAQRNNPGVYTRLPLFRDWIKENTGV

SEQ ID NO: 584 - protein, 241 aa, Homo sapiens
  Mutant MT-SP1 sequence; protease domain
  CB0451
VVGGTDADEGEWPWQVSLHALGQGHICGASLISPNWLVSAAHCYIDDRGFRYSDPTQWTAFLGLHDQSQRSAPGVQERRLKRIISHPFFNDFTFDYDIALLELEKPAEYSSMVRPICLPDASHVFPAGKAIWVTGWGHTQDGGTGALILQKGEIRVINQTTCENLLPQQITPRMMCVGFLSGGVDSCQGDSGGPLSSVEADGRIFQAGVVSWGDGCALRNSPGVYTRLPLFRDWIKENTGV

SEQ ID NO: 585 - protein, 241 aa, Homo sapiens
  Mutant MT-SP1 sequence; protease domain
  CB0332
VVGGTDADEGEWPWQVSLHALGQGHECGASLISPNWLVSAAHCYIDDRGFRYSDPTQWTAFLGLHDQSQRSAPGVQERRLKRIISHPFFNDFTFDYDIALLELEKPAEYSSMVRPICLPDASHVFPAGKAIWVTGWGHTQDGGTGALILQKGEIRVINQTTCENLLPQQITPRMMCVGFLSGGVDSCQGDSGGPLSSVEADGRIFQAGVVSWGDGCAQRNLPGVYTRLPLFRDWIKENTGV

SEQ ID NO: 586 - protein, 241 aa, Homo sapiens
  Mutant MT-SP1 sequence; protease domain
  CB0403
VVGGTDADEGEWPWQVSLHALGQGHICGASLISPNWLVSAAHCYIDDRGFRYSDPTQWTAFLGLHDQSQRSAPGVQERRLKRIISHPFFNDFTFDYDIALLELEKPAEYSSMVRPICLPDASHVFPAGKAIWVTGWGHTQDGGTGALILQKGEIRVINQTTCENLLPQQITPRMMCVGFLSGGVDSCQGDSGGPLSSVEADGRIFQAGVVSWGFGCAQRNLPGVYTRLPLFRDWIKENTGV

SEQ ID NO: 587 - protein, 241 aa, Homo sapiens
  Mutant MT-SP1 sequence; protease domain
  CB0353
VVGGTDADEGEWPWQVSLHALGQGHICGASLISPNWLVSAAHCYIDDRGFRYSDPTQWTAFLGLHDQSQRSAPGVQERRLKRIISHPFFNDFTFDYDIALLELEKPAEYSSMVRPICLPDASHVFPAGKAIWVTGWGVTQDGGTGALILQKGEIRVINQTTCENLLPQQITPRMMCVGFLSGGVDSCQGDSGGPLSSVEADGRIFQAGVVSWGDGCAQRNFPGVYTRLPLFRDWIKENTGV

SEQ ID NO: 588 - protein, 241 aa, Homo sapiens
  Mutant MT-SP1 sequence; protease domain
  CB0213
VVGGTDADEGEWPWQVSLHALGQGHICGASLISPNWLVSAAHCYIDDRGFRYSDPTQWTAFLGLHDQSQRSAPGVQERRLKRIISHPFFNDFTFDYDIALLELEKPAEYSSMVRPICLPDASHVFPAGKAIWVTGWGHTQEGGTGALILQKGEIRVINQTTCENLLPQQITPRMMCVGFLSGGVDSCQGDSGGPLSSVEADGRIFQAGVVSWGDGCAQRNFPGVYTRLPLFRDWIKENTGV

SEQ ID NO: 589 - protein, 241 aa, Homo sapiens
  Mutant MT-SP1 sequence; protease domain
  CB0214
VVGGTDADEGEWPWQVSLHALGQGHICGASLISPNWLVSAAHCYIDDRGFRYSDPTQWTAFLGLHDQSQRSAPGVQERRLKRIISHPFFNDFTFDYDIALLELEKPAEYSSMVRPICLPDASHVFPAGKAIWVTGWGHTQAGGTGALILQKGEIRVINQTTCENLLPQQITPRMMCVGFLSGGVDSCQGDSGGPLSSVEADGRIFQAGVVSWGDGCAQRNFPGVYTRLPLFRDWIKENTGV

SEQ ID NO: 590 - protein, 241 aa, Homo sapiens
  Mutant MT-SP1 sequence; protease domain
  CB0255
VVGGTDADEGEWPWQVSLHALGQGHICGASLISPNWLVSAAHCYIDDRGFRYSDPTQWTAFLGLHDQSQRSAPGVQERRLKRIISHPFFNDFTFDYDIALLELEKPAEYSSMVRPICLPDASHVFPAGKAIWVTGWGHTQEGGTGALILQKGEIRVINQTTCENLLPQQITPRMMCVGFLSGGVDSCQGDSGGPLSSVEADGRIFQAGVVSWGDGCAQRNTPGVYTRLPLFRDWIKENTGV

SEQ ID NO: 591 - protein, 241 aa, Homo sapiens
  Mutant MT-SP1 sequence; protease domain
  CB0423
VVGGTDADEGEWPWQVSLHALGQGHTCGASLISPNWLVSAAHCYIDDRGFRYSDPTQWTAFLGLHDQSQRSAPGVQERRLKRIISHPFFNDFTFDYDIALLELEKPAEYSSMVRPICLPDASHVFPAGKAIWVTGWGHTQEGGTGALILQKGEIRVINQTTCENLLPQQITPRMMCVGFLSGGVDSCQGDSGGPLSSVEADGRIFQAGVVSWGDGCAQRNLPGVYTRLPLFRDWIKENTGV

SEQ ID NO: 592 - protein, 241 aa, Homo sapiens; identical to SEQ ID NO: 53
  Mutant MT-SP1 sequence; protease domain
  CB0016

SEQ ID NO: 593 - protein, 241 aa, Homo sapiens
  Mutant MT-SP1 sequence; protease domain
  CB0017
VVGGTDADEGEWPWQVSLHALGQGHICGASLISPNWLVSAAHCYIDDRGFRYSDPTQWTAFLGLHDQSQRSAPGVQERRLKRIISHPFFNDFTFDYDIALLELEKPAEYSSMVRPICLPDASHVFPAGKAIWVTGWGHTQYGGTGALILQKGEIRVINQTTCENLNPQQITPRMMCVGFLSGGVDSCQGDSGGPLSSVEADGRIFQAGVVSWGDGCAQRNKPGVYTRLPLFRDWIKENTGV

SEQ ID NO: 594 - protein, 241 aa, Homo sapiens
  Mutant MT-SP1 sequence; protease domain
  CB0413
VVGGTDADEGEWPWQVSLHALGQGHFCGASLISPNWLVSAAHCYIDDRGFRYSDPTQWTAFLGLHDQSQRSAPGVQERRLKRIISHPFFNDFTFDYDIALLELEKPAEYSSMVRPICLPDASHVFPAGKAIWVTGWGHTQDGGTGALILQKGEIRVINQTTCENLLPQQITPRMMCVGFLSGGVDSCQGDSGGPLSSVEADGRIFQAGVVSWGDGCAQRNFPGVYTRLPLFRDWIKENTGV

SEQ ID NO: 595 - protein, 241 aa, Homo sapiens
  Mutant MT-SP1 sequence; protease domain
  CB0412
VVGGTDADEGEWPWQVSLHALGQGHLCGASLISPNWLVSAAHCYIDDRGFRYSDPTQWTAFLGLHDQSQRSAPGVQERRLKRIISHPFFNDFTFDYDIALLELEKPAEYSSMVRPICLPDASHVFPAGKAIWVTGWGHTQDGGTGALILQKGEIRVINQTTCENLLPQQITPRMMCVGFLSGGVDSCQGDSGGPLSSVEADGRIFQAGVVSWGDGCAQRNFPGVYTRLPLFRDWIKENTGV

SEQ ID NO: 596 - protein, 241 aa, Homo sapiens
  Mutant MT-SP1 sequence; protease domain
  CB0450
VVGGTDADEGEWPWQVSLHALGQGHTCGASLISPNWLVSAAHCYIDDRGFRYSDPTQWTAFLGLHDQSQRSAPGVQERRLKRIISHPFFNDFTFDYDIALLELEKPAEYSSMVRPICLPDASHVFPAGKAIWVTGWGHTQDGGTLALILQKGEIRVINQTTCENLLPQQITPRMMCVGFLSGGVDSCQGDSGGPLSSVEADGRIFQAGVVSWGDGCAQRNFPGVYTRLPLFRDWIKENTGV

SEQ ID NO: 597 - protein, 241 aa, Homo sapiens
  Mutant MT-SP1 sequence; protease domain
  CB0409
VVGGTDADEGEWPWQVSLHALGQGHACGASLISPNWLVSAAHCYIDDRGFRYSDPTQWTAFLGLHDQSQRSAPGVQERRLKRIISHPFFNDFTFDYDIALLELEKPAEYSSMVRPICLPDASHVFPAGKAIWVTGWGHTQDGGTGALILQKGEIRVINQTTCENLLPQQITPRMMCVGFLSGGVDSCQGDSGGPLSSVEADGRIFQAGVVSWGDGCAQRNFPGVYTRLPLFRDWIKENTGV

SEQ ID NO: 598 - protein, 241 aa, Homo sapiens
  Mutant MT-SP1 sequence; protease domain
  CB0350
VVGGTDADEGEWPWQVSLHALGQGHECGASLISPNWLVSAAHCYIDDRGFRYSDPTQWTAFLGLHDQSQRSAPGVQERRLKRIISHPFFNDFTFDYDIALLELEKPAEYSSMVRPICLPDASHVFPAGKAIWVTGWGHTQDGGTGALILQKGEIRVINQTTCENLLPQQITPRMMCVGFLSGGVDSCQGDSGGPLSSVEADGRIFQAGVVSWGDGCAQRNFPGVYTRLPLFRDWIKENTGV

SEQ ID NO: 599 - protein, 241 aa, Homo sapiens
  Mutant MT-SP1 sequence; protease domain
  CB0331
VVGGTDADEGEWPWQVSLHALGQGHDCGASLISPNWLVSAAHCYIDDRGFRYSDPTQWTAFLGLHDQSQRSAPGVQERRLKRIISHPFFNDFTFDYDIALLELEKPAEYSSMVRPICLPDASHVFPAGKAIWVTGWGHTQDGGTGALILQKGEIRVINQTTCENLLPQQITPRMMCVGFLSGGVDSCQGDSGGPLSSVEADGRIFQAGVVSWGDGCAQRNLPGVYTRLPLFRDWIKENTGV

SEQ ID NO: 600 - protein, 241 aa, Homo sapiens
  Mutant MT-SP1 sequence; protease domain
  CB0349
VVGGTDADEGEWPWQVSLHALGQGHDCGASLISPNWLVSAAHCYIDDRGFRYSDPTQWTAFLGLHDQSQRSAPGVQERRLKRIISHPFFNDFTFDYDIALLELEKPAEYSSMVRPICLPDASHVFPAGKAIWVTGWGHTQDGGTGALILQKGEIRVINQTTCENLLPQQITPRMMCVGFLSGGVDSCQGDSGGPLSSVEADGRIFQAGVVSWGDGCAQRNFPGVYTRLPLFRDWIKENTGV

SEQ ID NO: 601 - protein, 241 aa, Homo sapiens
  Mutant MT-SP1 sequence; protease domain
  CB0212
VVGGTDADEGEWPWQVSLHALGQGHICGASLISPNWLVSAAHCYIDDRGFRYSDPTQWTAFLGLHDQSQRSAPGVQERRLKRIISHPFFNDFTFDYDIALLELEKPAEYSSMVRPICLPDASHVFPAGKAIWVTGWGHTQNGGTGALILQKGEIRVINQTTCENLLPQQITPRMMCVGFLSGGVDSCQGDSGGPLSSVEADGRIFQAGVVSWGDGCAQRNFPGVYTRLPLFRDWIKENTGV

SEQ ID NO: 602 - protein, 241 aa, Homo sapiens
  Mutant MT-SP1 sequence; protease domain
  CB0421
VVGGTDADEGEWPWQVSLHALGQGHTCGASLISPNWLVSAAHCYIDDRGFRYSDPTQWTAFLGLHDQSQRSAPGVQERRLKRIISHPFFNDFTFDYDIALLELEKPAEYSSMVRPICLPDASHVFPAGKAIWVTGWGHTQDGGTGALILQKGEIRVINQTTCENLLPQDITPRMMCVGFLSGGVDSCQGDSGGPLSSVEADGRIFQAGVVSWGDGCAQRNFPGVYTRLPLFRDWIKENTGV

SEQ ID NO: 603 - protein, 241 aa, Homo sapiens
  Mutant MT-SP1 sequence; protease domain
  CB0218
VVGGTDADEGEWPWQVSLHALGQGHICGASLISPNWLVSAAHCYIDDRGFRYSDPTQWTAFLGLHDQSQRSAPGVQERRLKRIISHPFFNDFTFDYDIALLELEKPAEYSSMVRPICLPDASHVFPAGKAIWVTGWGHTQYGGTGALILQKGEIRVINQTTCENLLPQQITPRMMCVGFLSGGVDSCFGDSGGPLSSVEADGRIFQAGVVSWGDGCAQRNFPGVYTRLPLFRDWIKENTGV

SEQ ID NO: 604 - protein, 241 aa, Homo sapiens
  Mutant MT-SP1 sequence; protease domain
  CB0219
VVGGTDADEGEWPWQVSLHALGQGHICGASLISPNWLVSAAHCYIDDRGFRYSDPTQWTAFLGLHDQSQRSAPGVQERRLKRIISHPFFNDFTFDYDIALLELEKPAEYSSMVRPICLPDASHVFPAGKAIWVTGWGHTQDGGTGALILQKGEIRVINQTTCENLLPQQITPRMMCVGFLSGGVDSCAGDSGGPLSSVEADGRIFQAGVVSWGDGCAQRNFPGVYTRLPLFRDWIKENTGV

SEQ ID NO: 605 - protein, 241 aa, Homo sapiens
  Mutant MT-SP1 sequence; protease domain
  CB0216
VVGGTDADEGEWPWQVSLHALGQGHICGASLISPNWLVSAAHCYIDDRGFRYSDPTQWTAFLGLHDQSQRSAPGVQERRLKRIISHPFFNDFTFDYDIALLELEKPAEYSSMVRPICLPDASHVFPAGKAIWVTGWGHTQYGGTGALILQKGEIRVINQTTCENLLPQQITPRMMCVGFLSGGVDSCVGDSGGPLSSVEADGRIFQAGVVSWGDGCAQRNFPGVYTRLPLFRDWIKENTGV

SEQ ID NO: 606 - protein, 855 aa, Homo sapiens
  Mutant MT-SP1 sequence; full length
  CB0252
MGSDRARKGGGGPKDFGAGLKYNSRHEKVNGLEEGVEFLPVNNVKKVEKHGPGRWVVLAAVLIGLLLVLLGIGFLVWHLQYRDVRVQKVFNGYMRITNENFVDAYENSNSTEFVSLASKVKDALKLLYSGVPFLGPYHKESAVTAFSEGSVIAYYWSEFSIPQHLVEEAERVMAEERVVMLPPRARSLKSFVVTSVVAFPTDSKTVQRTQDNSCSFGLHARGVELMRFTTPGFPDSPYPAHARCQWALRGDADSVLSLTFRSFDLASCDERGSDLVTVYNTLSPMEPHALVQLCGTYPPSYNLTFHSSQNVLLITLITNTERRHPGFEATFFQLPRMSSCGGRLRKAQGTFNSPYYPGHYPPNIDCTWNIEVPNNQHVKVRFKFFYLLEPGVPAGTCPKDYVEINGEKYCGERSQFVVTSNSNKITVRFHSDQSYTDTGFLAEYLSYDSSDPCPGQFTCRTGRCIRKELRCDGWADCTDHSDELNCSCDAGHQFTCKNKFCKPLFWVCDSVNDCGDNSDEQGCSCPAQTFRCSNGKCLSKSQQCNGKDDCGDGSDEASCPKVNVVTCTKHTYRCLNGLCLSKGNPECDGKEDCSDGSDEKDCDCGLRSFTRQARVVGGTDADEGEWPWQVSLHALGQGHICGASLISPNWLVSAAHCYIDDRGFRYSDPTQWTAFLGLHDQSQRSAPGVQERRLKRIISHPFFNDFTFDYDIALLELEKPAEYSSMVRPICLPDASHVFPAGKAIWVTGWGHTQEGGTGALILQKGEIRVINQTTCENLLPQQITPRMMCVGFLSGGVDSCQGDSGGPLSSVEADGRIFQAGVVSWGDGCAQRNNPGVYTRLPLFRDWIKENTGV

SEQ ID NO: 607 - protein, 855 aa, Homo sapiens
  Mutant MT-SP1 sequence; full length
  CB0486
MGSDRARKGGGGPKDFGAGLKYNSRHEKVNGLEEGVEFLPVNNVKKVEKHGPGRWVVLAAVLIGLLLVLLGIGFLVWHLQYRDVRVQKVFNGYMRITNENFVDAYENSNSTEFVSLASKVKDALKLLYSGVPFLGPYHKESAVTAFSEGSVIAYYWSEFSIPQHLVEEAERVMAEERVVMLPPRARSLKSFVVTSVVAFPTDSKTVQRTQDNSCSFGLHARGVELMRFTTPGFPDSPYPAHARCQWALRGDADSVLSLTFRSFDLASCDERGSDLVTVYNTLSPMEPHALVQLCGTYPPSYNLTFHSSQNVLLITLITNTERRHPGFEATFFQLPRMSSCGGRLRKAQGTFNSPYYPGHYPPNIDCTWNIEVPNNQHVKVRFKFFYLLEPGVPAGTCPKDYVEINGEKYCGERSQFVVTSNSNKITVRFHSDQSYTDTGFLAEYLSYDSSDPCPGQFTCRTGRCIRKELRCDGWADCTDHSDELNCSCDAGHQFTCKNKFCKPLFWVCDSVNDCGDNSDEQGCSCPAQTFRCSNGKCLSKSQQCNGKDDCGDGSDEASCPKVNVVTCTKHTYRCLNGLCLSKGNPECDGKEDCSDGSDEKDCDCGLRSFTRQARVVGGTDADEGEWPWQVSLHALGQGHTCGASLISPNWLVSAAHCYIDDRGFRYSDPTQWTAFLGLHDQSQRSAPGVQERRLKRIISHPFFNDFTFDYDIALLELEKPAEYSSMVRPICLPDASHVFPAGKAIWVTGWGHTQEGGTGALILQKGEIRVINQTTCENLLPQDITPRMMCVGFLSGGVDSCQGDSGGPLSSVEADGRIFQAGVVSWGDGCAQRNRPGVYTRLPLFRDWIKENTGV

SEQ ID NO: 608 - protein, 855 aa, Homo sapiens
  Mutant MT-SP1 sequence; full length
  CB0351
MGSDRARKGGGGPKDFGAGLKYNSRHEKVNGLEEGVEFLPVNNVKKVEKHGPGRWVVLAAVLIGLLLVLLGIGFLVWHLQYRDVRVQKVFNGYMRITNENFVDAYENSNSTEFVSLASKVKDALKLLYSGVPFLGPYHKESAVTAFSEGSVIAYYWSEFSIPQHLVEEAERVMAEERVVMLPPRARSLKSFVVTSVVAFPTDSKTVQRTQDNSCSFGLHARGVELMRFTTPGFPDSPYPAHARCQWALRGDADSVLSLTFRSFDLASCDERGSDLVTVYNTLSPMEPHALVQLCGTYPPSYNLTFHSSQNVLLITLITNTERRHPGFEATFFQLPRMSSCGGRLRKAQGTFNSPYYPGHYPPNIDCTWNIEVPNNQHVKVRFKFFYLLEPGVPAGTCPKDYVEINGEKYCGERSQFVVTSNSNKITVRFHSDQSYTDTGFLAEYLSYDSSDPCPGQFTCRTGRCIRKELRCDGWADCTDHSDELNCSCDAGHQFTCKNKFCKPLFWVCDSVNDCGDNSDEQGCSCPAQTFRCSNGKCLSKSQQCNGKDDCGDGSDEASCPKVNVVTCTKHTYRCLNGLCLSKGNPECDGKEDCSDGSDEKDCDCGLRSFTRQARVVGGTDADEGEWPWQVSLHALGQGHTCGASLISPNWLVSAAHCYIDDRGFRYSDPTQWTAFLGLHDQSQRSAPGVQERRLKRIISHPFFNDFTFDYDIALLELEKPAEYSSMVRPICLPDASHVFPAGKAIWVTGWGHTQDGGTGALILQKGEIRVINQTTCENLLPQQITPRMMCVGFLSGGVDSCQGDSGGPLSSVEADGRIFQAGVVSWGDGCAQRNFPGVYTRLPLFRDWIKENTGV

SEQ ID NO: 609 - protein, 855 aa, Homo sapiens
  Mutant MT-SP1 sequence; full length
  CB0422
MGSDRARKGGGGPKDFGAGLKYNSRHEKVNGLEEGVEFLPVNNVKKVEKHGPGRWVVLAAVLIGLLLVLLGIGFLVWHLQYRDVRVQKVFNGYMRITNENFVDAYENSNSTEFVSLASKVKDALKLLYSGVPFLGPYHKESAVTAFSEGSVIAYYWSEFSIPQHLVEEAERVMAEERVVMLPPRARSLKSFVVTSVVAFPTDSKTVQRTQDNSCSFGLHARGVELMRFTTPGFPDSPYPAHARCQWALRGDADSVLSLTFRSFDLASCDERGSDLVTVYNTLSPMEPHALVQLCGTYPPSYNLTFHSSQNVLLITLITNTERRHPGFEATFFQLPRMSSCGGRLRKAQGTFNSPYYPGHYPPNIDCTWNIEVPNNQHVKVRFKFFYLLEPGVPAGTCPKDYVEINGEKYCGERSQFVVTSNSNKITVRFHSDQSYTDTGFLAEYLSYDSSDPCPGQFTCRTGRCIRKELRCDGWADCTDHSDELNCSCDAGHQFTCKNKFCKPLFWVCDSVNDCGDNSDEQGCSCPAQTFRCSNGKCLSKSQQCNGKDDCGDGSDEASCPKVNVVTCTKHTYRCLNGLCLSKGNPECDGKEDCSDGSDEKDCDCGLRSFTRQARVVGGTDADEGEWPWQVSLHALGQGHTCGASLISPNWLVSAAHCYIDDRGFRYSDPTQWTAFLGLHDQSQRSAPGVQERRLKRIISHPFFNDFTFDYDIALLELEKPAEYSSMVRPICLPDASHVFPAGKAIWVTGWGHTQEGGTGALILQKGEIRVINQTTCENLLPQDITPRMMCVGFLSGGVDSCQGDSGGPLSSVEADGRIFQAGVVSWGDGCAQRNNPGVYTRLPLFRDWIKENTGV

SEQ ID NO: 610 - protein, 855 aa, Homo sapiens
  Mutant MT-SP1 sequence; full length
  CB0489
MGSDRARKGGGGPKDFGAGLKYNSRHEKVNGLEEGVEFLPVNNVKKVEKHGPGRWVVLAAVLIGLLLVLLGIGFLVWHLQYRDVRVQKVFNGYMRITNENFVDAYENSNSTEFVSLASKVKDALKLLYSGVPFLGPYHKESAVTAFSEGSVIAYYWSEFSIPQHLVEEAERVMAEERVVMLPPRARSLKSFVVTSVVAFPTDSKTVQRTQDNSCSFGLHARGVELMRFTTPGFPDSPYPAHARCQWALRGDADSVLSLTFRSFDLASCDERGSDLVTVYNTLSPMEPHALVQLCGTYPPSYNLTFHSSQNVLLITLITNTERRHPGFEATFFQLPRMSSCGGRLRKAQGTFNSPYYPGHYPPNIDCTWNIEVPNNQHVKVRFKFFYLLEPGVPAGTCPKDYVEINGEKYCGERSQFVVTSNSNKITVRFHSDQSYTDTGFLAEYLSYDSSDPCPGQFTCRTGRCIRKELRCDGWADCTDHSDELNCSCDAGHQFTCKNKFCKPLFWVCDSVNDCGDNSDEQGCSCPAQTFRCSNGKCLSKSQQCNGKDDCGDGSDEASCPKVNVVTCTKHTYRCLNGLCLSKGNPECDGKEDCSDGSDEKDCDCGLRSFTRQARVVGGTDADEGEWPWQVSLHALGQGHTCGASLISPNWLVSAAHCYIDDRGFRYSDPTQWTAFLGLHDQSQRSAPGVQERRLKRIISHPFFNDFTFDYDIALLELEKPAEYSSMVRPICLPDASHVFPAGKAIWVTGWGHTQEGGTLALILQKGEIRVINQTTCENLLPQDITPRMMCVGFLSGGVDSCQGDSGGPLSSVEADGRIFQAGVVSWGDGCAQRNLPGVYTRLPLFRDWIKENTGV

SEQ ID NO: 611 - protein, 855 aa, Homo sapiens
  Mutant MT-SP1 sequence; full length
  CB0464
MGSDRARKGGGGPKDFGAGLKYNSRHEKVNGLEEGVEFLPVNNVKKVEKHGPGRWVVLAAVLIGLLLVLLGIGFLVWHLQYRDVRVQKVFNGYMRITNENFVDAYENSNSTEFVSLASKVKDALKLLYSGVPFLGPYHKESAVTAFSEGSVIAYYWSEFSIPQHLVEEAERVMAEERVVMLPPRARSLKSFVVTSVVAFPTDSKTVQRTQDNSCSFGLHARGVELMRFTTPGFPDSPYPAHARCQWALRGDADSVLSLTFRSFDLASCDERGSDLVTVYNTLSPMEPHALVQLCGTYPPSYNLTFHSSQNVLLITLITNTERRHPGFEATFFQLPRMSSCGGRLRKAQGTFNSPYYPGHYPPNIDCTWNIEVPNNQHVKVRFKFFYLLEPGVPAGTCPKDYVEINGEKYCGERSQFVVTSNSNKITVRFHSDQSYTDTGFLAEYLSYDSSDPCPGQFTCRTGRCIRKELRCDGWADCTDHSDELNCSCDAGHQFTCKNKFCKPLFWVCDSVNDCGDNSDEQGCSCPAQTFRCSNGKCLSKSQQCNGKDDCGDGSDEASCPKVNVVTCTKHTYRCLNGLCLSKGNPECDGKEDCSDGSDEKDCDCGLRSFTRQARVVGGTDADEGEWPWQVSLHALGQGHICGASLISPNWLVSAAHCYIDDRGFRYSDPTQWTAFLGLHDQSQRSAPGVQERRLKRIISHPFFNDFTFDYDIALLELEKPAEYSSMVRPICLPDASHVFPAGKAIWVTGWGHTQEGGTGALILQKGEIRVINQTTCENLLPEFITPRMMCVGFLSGGVDSCQGDSGGPLSSVEADGRIFQAGVVSWGDGCAQRNKPGVYTRLPLFRDWIKENTGV

SEQ ID NO: 612 - protein, 855 aa, Homo sapiens
  Mutant MT-SP1 sequence; full length
  CB0490
MGSDRARKGGGGPKDFGAGLKYNSRHEKVNGLEEGVEFLPVNNVKKVEKHGPGRWVVLAAVLIGLLLVLLGIGFLVWHLQYRDVRVQKVFNGYMRITNENFVDAYENSNSTEFVSLASKVKDALKLLYSGVPFLGPYHKESAVTAFSEGSVIAYYWSEFSIPQHLVEEAERVMAEERVVMLPPRARSLKSFVVTSVVAFPTDSKTVQRTQDNSCSFGLHARGVELMRFTTPGFPDSPYPAHARCQWALRGDADSVLSLTFRSFDLASCDERGSDLVTVYNTLSPMEPHALVQLCGTYPPSYNLTFHSSQNVLLITLITNTERRHPGFEATFFQLPRMSSCGGRLRKAQGTFNSPYYPGHYPPNIDCTWNIEVPNNQHVKVRFKFFYLLEPGVPAGTCPKDYVEINGEKYCGERSQFVVTSNSNKITVRFHSDQSYTDTGFLAEYLSYDSSDPCPGQFTCRTGRCIRKELRCDGWADCTDHSDELNCSCDAGHQFTCKNKFCKPLFWVCDSVNDCGDNSDEQGCSCPAQTFRCSNGKCLSKSQQCNGKDDCGDGSDEASCPKVNVVTCTKHTYRCLNGLCLSKGNPECDGKEDCSDGSDEKDCDCGLRSFTRQARVVGGTDADEGEWPWQVSLHALGQGHTCGASLISPNWLVSAAHCYIDDRGFRYSDPTQWTAFLGLHDQSQRSAPGVQERRLKRIISHPFFNDFTFDYDIALLELEKPAEYSSMVRPICLPDASHVFPAGKAIWVTGWGHTQEGGTLALILQKGEIRVINQTTCENLLPQDITPRMMCVGFLSGGVDSCQGDSGGPLSSVEADGRIFQAGVVSWGDGCAQRNRPGVYTRLPLFRDWIKENTGV

SEQ ID NO: 613 - protein, 855 aa, Homo sapiens
  Mutant MT-SP1 sequence; full length
  CB0487
MGSDRARKGGGGPKDFGAGLKYNSRHEKVNGLEEGVEFLPVNNVKKVEKHGPGRWVVLAAVLIGLLLVLLGIGFLVWHLQYRDVRVQKVFNGYMRITNENFVDAYENSNSTEFVSLASKVKDALKLLYSGVPFLGPYHKESAVTAFSEGSVIAYYWSEFSIPQHLVEEAERVMAEERVVMLPPRARSLKSFVVTSVVAFPTDSKTVQRTQDNSCSFGLHARGVELMRFTTPGFPDSPYPAHARCQWALRGDADSVLSLTFRSFDLASCDERGSDLVTVYNTLSPMEPHALVQLCGTYPPSYNLTFHSSQNVLLITLITNTERRHPGFEATFFQLPRMSSCGGRLRKAQGTFNSPYYPGHYPPNIDCTWNIEVPNNQHVKVRFKFFYLLEPGVPAGTCPKDYVEINGEKYCGERSQFVVTSNSNKITVRFHSDQSYTDTGFLAEYLSYDSSDPCPGQFTCRTGRCIRKELRCDGWADCTDHSDELNCSCDAGHQFTCKNKFCKPLFWVCDSVNDCGDNSDEQGCSCPAQTFRCSNGKCLSKSQQCNGKDDCGDGSDEASCPKVNVVTCTKHTYRCLNGLCLSKGNPECDGKEDCSDGSDEKDCDCGLRSFTRQARVVGGTDADEGEWPWQVSLHALGQGHTCGASLISPNWLVSAAHCYIDDRGFRYSDPTQWTAFLGLHDQSQRSAPGVQERRLKRIISHPFFNDFTFDYDIALLELEKPAEYSSMVRPICLPDASHVFPAGKAIWVTGWGHTQEGGTLALILQKGEIRVINQTTCENLLPQDITPRMMCVGFLSGGVDSCQGDSGGPLSSVEADGRIFQAGVVSWGDGCAQRNNPGVYTRLPLFRDWIKENTGV

SEQ ID NO: 614 - protein, 855 aa, Homo sapiens
  Mutant MT-SP1 sequence; full length
  CB0268
MGSDRARKGGGGPKDFGAGLKYNSRHEKVNGLEEGVEFLPVNNVKKVEKHGPGRWVVLAAVLIGLLLVLLGIGFLVWHLQYRDVRVQKVFNGYMRITNENFVDAYENSNSTEFVSLASKVKDALKLLYSGVPFLGPYHKESAVTAFSEGSVIAYYWSEFSIPQHLVEEAERVMAEERVVMLPPRARSLKSFVVTSVVAFPTDSKTVQRTQDNSCSFGLHARGVELMRFTTPGFPDSPYPAHARCQWALRGDADSVLSLTFRSFDLASCDERGSDLVTVYNTLSPMEPHALVQLCGTYPPSYNLTFHSSQNVLLITLITNTERRHPGFEATFFQLPRMSSCGGRLRKAQGTFNSPYYPGHYPPNIDCTWNIEVPNNQHVKVRFKFFYLLEPGVPAGTCPKDYVEINGEKYCGERSQFVVTSNSNKITVRFHSDQSYTDTGFLAEYLSYDSSDPCPGQFTCRTGRCIRKELRCDGWADCTDHSDELNCSCDAGHQFTCKNKFCKPLFWVCDSVNDCGDNSDEQGCSCPAQTFRCSNGKCLSKSQQCNGKDDCGDGSDEASCPKVNVVTCTKHTYRCLNGLCLSKGNPECDGKEDCSDGSDEKDCDCGLRSFTRQARVVGGTDADEGEWPWQVSLHALGQGHICGASLISPNWLVSAAHCYIDDRGFRYSDPTQWTAFLGLHDQSQRSAPGVQERRLKRIISHPFFNDFTFDYDIALLELEKPAEYSSMVRPICLPDASHVFPAGKAIWVTGWGHTQYGGTGALILQKGEIRVINQTTCENLLPQQITPRMMCVGFLSGGVDSCQGDSGGPLSSVEADGRIFQAGVVSWGDGCADRNKPGVYTRLPLFRDWIKENTGV

SEQ ID NO: 615 - protein, 855 aa, Homo sapiens
  Mutant MT-SP1 sequence; full length
  CB0251
MGSDRARKGGGGPKDFGAGLKYNSRHEKVNGLEEGVEFLPVNNVKKVEKHGPGRWVVLAAVLIGLLLVLLGIGFLVWHLQYRDVRVQKVFNGYMRITNENFVDAYENSNSTEFVSLASKVKDALKLLYSGVPFLGPYHKESAVTAFSEGSVIAYYWSEFSIPQHLVEEAERVMAEERVVMLPPRARSLKSFVVTSVVAFPTDSKTVQRTQDNSCSFGLHARGVELMRFTTPGFPDSPYPAHARCQWALRGDADSVLSLTFRSFDLASCDERGSDLVTVYNTLSPMEPHALVQLCGTYPPSYNLTFHSSQNVLLITLITNTERRHPGFEATFFQLPRMSSCGGRLRKAQGTFNSPYYPGHYPPNIDCTWNIEVPNNQHVKVRFKFFYLLEPGVPAGTCPKDYVEINGEKYCGERSQFVVTSNSNKITVRFHSDQSYTDTGFLAEYLSYDSSDPCPGQFTCRTGRCIRKELRCDGWADCTDHSDELNCSCDAGHQFTCKNKFCKPLFWVCDSVNDCGDNSDEQGCSCPAQTFRCSNGKCLSKSQQCNGKDDCGDGSDEASCPKVNVVTCTKHTYRCLNGLCLSKGNPECDGKEDCSDGSDEKDCDCGLRSFTRQARVVGGTDADEGEWPWQVSLHALGQGHICGASLISPNWLVSAAHCYIDDRGFRYSDPTQWTAFLGLHDQSQRSAPGVQERRLKRIISHPFFNDFTFDYDIALLELEKPAEYSSMVRPICLPDASHVFPAGKAIWVTGWGHTQEGGTGALILQKGEIRVINQTTCENLLPQQITPRMMCVGFLSGGVDSCQGDSGGPLSSVEADGRIFQAGVVSWGDGCAQRNRPGVYTRLPLFRDWIKENTGV

SEQ ID NO: 616 - protein, 855 aa, Homo sapiens
  Mutant MT-SP1 sequence; full length
  CB0377
MGSDRARKGGGGPKDFGAGLKYNSRHEKVNGLEEGVEFLPVNNVKKVEKHGPGRWVVLAAVLIGLLLVLLGIGFLVWHLQYRDVRVQKVFNGYMRITNENFVDAYENSNSTEFVSLASKVKDALKLLYSGVPFLGPYHKESAVTAFSEGSVIAYYWSEFSIPQHLVEEAERVMAEERVVMLPPRARSLKSFVVTSVVAFPTDSKTVQRTQDNSCSFGLHARGVELMRFTTPGFPDSPYPAHARCQWALRGDADSVLSLTFRSFDLASCDERGSDLVTVYNTLSPMEPHALVQLCGTYPPSYNLTFHSSQNVLLITLITNTERRHPGFEATFFQLPRMSSCGGRLRKAQGTFNSPYYPGHYPPNIDCTWNIEVPNNQHVKVRFKFFYLLEPGVPAGTCPKDYVEINGEKYCGERSQFVVTSNSNKITVRFHSDQSYTDTGFLAEYLSYDSSDPCPGQFTCRTGRCIRKELRCDGWADCTDHSDELNCSCDAGHQFTCKNKFCKPLFWVCDSVNDCGDNSDEQGCSCPAQTFRCSNGKCLSKSQQCNGKDDCGDGSDEASCPKVNVVTCTKHTYRCLNGLCLSKGNPECDGKEDCSDGSDEKDCDCGLRSFTRQARVVGGTDADEGEWPWQVSLHALGQGHICGASLISPNWLVSAAHCYIDDRGFRYSDPTQWTAFLGLHDQSQRSAPGVQERRLKRIISHPFFNDFTFDYDIALLELEKPAEYSSMVRPICLPDASHVFPAGKAIWVTGWGHTQEGGTGALILQKGEIRVINQTTCENLLPQDITPRMMCVGFLSGGVDSCQGDSGGPLSSVEADGRIFQAGVVSWGDGCAQRNNPGVYTRLPLFRDWIKENTGV

SEQ ID NO: 617 - protein, 855 aa, Homo sapiens
  Mutant MT-SP1 sequence; full length
  CB0244
MGSDRARKGGGGPKDFGAGLKYNSRHEKVNGLEEGVEFLPVNNVKKVEKHGPGRWVVLAAVLIGLLLVLLGIGFLVWHLQYRDVRVQKVFNGYMRITNENFVDAYENSNSTEFVSLASKVKDALKLLYSGVPFLGPYHKESAVTAFSEGSVIAYYWSEFSIPQHLVEEAERVMAEERVVMLPPRARSLKSFVVTSVVAFPTDSKTVQRTQDNSCSFGLHARGVELMRFTTPGFPDSPYPAHARCQWALRGDADSVLSLTFRSFDLASCDERGSDLVTVYNTLSPMEPHALVQLCGTYPPSYNLTFHSSQNVLLITLITNTERRHPGFEATFFQLPRMSSCGGRLRKAQGTFNSPYYPGHYPPNIDCTWNIEVPNNQHVKVRFKFFYLLEPGVPAGTCPKDYVEINGEKYCGERSQFVVTSNSNKITVRFHSDQSYTDTGFLAEYLSYDSSDPCPGQFTCRTGRCIRKELRCDGWADCTDHSDELNCSCDAGHQFTCKNKFCKPLFWVCDSVNDCGDNSDEQGCSCPAQTFRCSNGKCLSKSQQCNGKDDCGDGSDEASCPKVNVVTCTKHTYRCLNGLCLSKGNPECDGKEDCSDGSDEKDCDCGLRSFTRQARVVGGTDADEGEWPWQVSLHALGQGHICGASLISPNWLVSAAHCYIDDRGFRYSDPTQWTAFLGLHDQSQRSAPGVQERRLKRIISHPFFNDFTFDYDIALLELEKPAEYSSMVRPICLPDASHVFPAGKAIWVTGWGHTQDGGTGALILQKGEIRVINQTTCENLLPQQITPRMMCVGFLSGGVDSCQGDSGGPLSSVEADGRIFQAGVVSWGDGCAQRNRPGVYTRLPLFRDWIKENTGV

SEQ ID NO: 618 - protein, 855 aa, Homo sapiens
  Mutant MT-SP1 sequence; full length
  CB0488
MGSDRARKGGGGPKDFGAGLKYNSRHEKVNGLEEGVEFLPVNNVKKVEKHGPGRWVVLAAVLIGLLLVLLGIGFLVWHLQYRDVRVQKVFNGYMRITNENFVDAYENSNSTEFVSLASKVKDALKLLYSGVPFLGPYHKESAVTAFSEGSVIAYYWSEFSIPQHLVEEAERVMAEERVVMLPPRARSLKSFVVTSVVAFPTDSKTVQRTQDNSCSFGLHARGVELMRFTTPGFPDSPYPAHARCQWALRGDADSVLSLTFRSFDLASCDERGSDLVTVYNTLSPMEPHALVQLCGTYPPSYNLTFHSSQNVLLITLITNTERRHPGFEATFFQLPRMSSCGGRLRKAQGTFNSPYYPGHYPPNIDCTWNIEVPNNQHVKVRFKFFYLLEPGVPAGTCPKDYVEINGEKYCGERSQFVVTSNSNKITVRFHSDQSYTDTGFLAEYLSYDSSDPCPGQFTCRTGRCIRKELRCDGWADCTDHSDELNCSCDAGHQFTCKNKFCKPLFWVCDSVNDCGDNSDEQGCSCPAQTFRCSNGKCLSKSQQCNGKDDCGDGSDEASCPKVNVVTCTKHTYRCLNGLCLSKGNPECDGKEDCSDGSDEKDCDCGLRSFTRQARVVGGTDADEGEWPWQVSLHALGQGHTCGASLISPNWLVSAAHCYIDDRGFRYSDPTQWTAFLGLHDQSQRSAPGVQERRLKRIISHPFFNDFTFDYDIALLELEKPAEYSSMVRPICLPDASHVFPAGKAIWVTGWGHTQEGGTLALILQKGEIRVINQTTCENLLPQDITPRMMCVGFLSGGVDSCQGDSGGPLSSVEADGRIFQAGVVSWGDGCAQRNFPGVYTRLPLFRDWIKENTGV

SEQ ID NO: 619 - protein, 855 aa, Homo sapiens
  Mutant MT-SP1 sequence; full length
  CB0373
MGSDRARKGGGGPKDFGAGLKYNSRHEKVNGLEEGVEFLPVNNVKKVEKHGPGRWVVLAAVLIGLLLVLLGIGFLVWHLQYRDVRVQKVFNGYMRITNENFVDAYENSNSTEFVSLASKVKDALKLLYSGVPFLGPYHKESAVTAFSEGSVIAYYWSEFSIPQHLVEEAERVMAEERVVMLPPRARSLKSFVVTSVVAFPTDSKTVQRTQDNSCSFGLHARGVELMRFTTPGFPDSPYPAHARCQWALRGDADSVLSLTFRSFDLASCDERGSDLVTVYNTLSPMEPHALVQLCGTYPPSYNLTFHSSQNVLLITLITNTERRHPGFEATFFQLPRMSSCGGRLRKAQGTFNSPYYPGHYPPNIDCTWNIEVPNNQHVKVRFKFFYLLEPGVPAGTCPKDYVEINGEKYCGERSQFVVTSNSNKITVRFHSDQSYTDTGFLAEYLSYDSSDPCPGQFTCRTGRCIRKELRCDGWADCTDHSDELNCSCDAGHQFTCKNKFCKPLFWVCDSVNDCGDNSDEQGCSCPAQTFRCSNGKCLSKSQQCNGKDDCGDGSDEASCPKVNVVTCTKHTYRCLNGLCLSKGNPECDGKEDCSDGSDEKDCDCGLRSFTRQARVVGGTDADEGEWPWQVSLHALGQGHICGASLISPNWLVSAAHCYIDDRGFRYSDPTQWTAFLGLHDQSQRSAPGVQERRLKRIISHPFFNDFTFDYDIALLELEKPAEYSSMVRPICLPDASHVFPAGKAIWVTGWGHTQEGGTGALILQKGEIRVINQTTCENLLPQDITPRMMCVGFLSGGVDSCQGDSGGPLSSVEADGRIFQAGVVSWGDGCAQRNRPGVYTRLPLFRDWIKENTGV

SEQ ID NO: 620 - protein, 855 aa, Homo sapiens
  Mutant MT-SP1 sequence; full length
  CB0232
MGSDRARKGGGGPKDFGAGLKYNSRHEKVNGLEEGVEFLPVNNVKKVEKHGPGRWVVLAAVLIGLLLVLLGIGFLVWHLQYRDVRVQKVFNGYMRITNENFVDAYENSNSTEFVSLASKVKDALKLLYSGVPFLGPYHKESAVTAFSEGSVIAYYWSEFSIPQHLVEEAERVMAEERVVMLPPRARSLKSFVVTSVVAFPTDSKTVQRTQDNSCSFGLHARGVELMRFTTPGFPDSPYPAHARCQWALRGDADSVLSLTFRSFDLASCDERGSDLVTVYNTLSPMEPHALVQLCGTYPPSYNLTFHSSQNVLLITLITNTERRHPGFEATFFQLPRMSSCGGRLRKAQGTFNSPYYPGHYPPNIDCTWNIEVPNNQHVKVRFKFFYLLEPGVPAGTCPKDYVEINGEKYCGERSQFVVTSNSNKITVRFHSDQSYTDTGFLAEYLSYDSSDPCPGQFTCRTGRCIRKELRCDGWADCTDHSDELNCSCDAGHQFTCKNKFCKPLFWVCDSVNDCGDNSDEQGCSCPAQTFRCSNGKCLSKSQQCNGKDDCGDGSDEASCPKVNVVTCTKHTYRCLNGLCLSKGNPECDGKEDCSDGSDEKDCDCGLRSFTRQARVVGGTDADEGEWPWQVSLHALGQGHICGASLISPNWLVSAAHCYIDDRGFRYSDPTQWTAFLGLHDQSQRSAPGVQERRLKRIISHPFFNDFTFDYDIALLELEKPAEYSSMVRPICLPDASHVFPAGKAIWVTGWGHTQEGGTGALILQKGEIRVINQTTCENLLPQQITPRMMCVGFLSGGVDSCQGDSGGPLSSVEADGRIFQAGVVSWGDGCAQRNLPGVYTRLPLFRDWIKENTGV

SEQ ID NO: 621 - protein, 855 aa, Homo sapiens
  Mutant MT-SP1 sequence; full length
  CB0082
MGSDRARKGGGGPKDFGAGLKYNSRHEKVNGLEEGVEFLPVNNVKKVEKHGPGRWVVLAAVLIGLLLVLLGIGFLVWHLQYRDVRVQKVFNGYMRITNENFVDAYENSNSTEFVSLASKVKDALKLLYSGVPFLGPYHKESAVTAFSEGSVIAYYWSEFSIPQHLVEEAERVMAEERVVMLPPRARSLKSFVVTSVVAFPTDSKTVQRTQDNSCSFGLHARGVELMRFTTPGFPDSPYPAHARCQWALRGDADSVLSLTFRSFDLASCDERGSDLVTVYNTLSPMEPHALVQLCGTYPPSYNLTFHSSQNVLLITLITNTERRHPGFEATFFQLPRMSSCGGRLRKAQGTFNSPYYPGHYPPNIDCTWNIEVPNNQHVKVRFKFFYLLEPGVPAGTCPKDYVEINGEKYCGERSQFVVTSNSNKITVRFHSDQSYTDTGFLAEYLSYDSSDPCPGQFTCRTGRCIRKELRCDGWADCTDHSDELNCSCDAGHQFTCKNKFCKPLFWVCDSVNDCGDNSDEQGCSCPAQTFRCSNGKCLSKSQQCNGKDDCGDGSDEASCPKVNVVTCTKHTYRCLNGLCLSKGNPECDGKEDCSDGSDEKDCDCGLRSFTRQARVVGGTDADEGEWPWQVSLHALGQGHICGASLISPNWLVSAAHCYIDDWGFRYSDPTQWTAFLGLHDQSQRSAPGVQERRLKRIISHPFFNDFTFDYDIALLELEKPAEYSSMVRPICLPDASHVFPAGKAIWVTGWGHTQYGGTGALILQKGEIRVINQTTCENLLPQQITPRMMCVGFLSGGVDSCQGDSGGPLSSVEADGRIFQAGVVSWGDGCAQRNKPGVYTRLPLFRDWIKENTGV

SEQ ID NO: 622 - protein, 855 aa, Homo sapiens
  Mutant MT-SP1 sequence; full length
  CB0274
MGSDRARKGGGGPKDFGAGLKYNSRHEKVNGLEEGVEFLPVNNVKKVEKHGPGRWVVLAAVLIGLLLVLLGIGFLVWHLQYRDVRVQKVFNGYMRITNENFVDAYENSNSTEFVSLASKVKDALKLLYSGVPFLGPYHKESAVTAFSEGSVIAYYWSEFSIPQHLVEEAERVMAEERVVMLPPRARSLKSFVVTSVVAFPTDSKTVQRTQDNSCSFGLHARGVELMRFTTPGFPDSPYPAHARCQWALRGDADSVLSLTFRSFDLASCDERGSDLVTVYNTLSPMEPHALVQLCGTYPPSYNLTFHSSQNVLLITLITNTERRHPGFEATFFQLPRMSSCGGRLRKAQGTFNSPYYPGHYPPNIDCTWNIEVPNNQHVKVRFKFFYLLEPGVPAGTCPKDYVEINGEKYCGERSQFVVTSNSNKITVRFHSDQSYTDTGFLAEYLSYDSSDPCPGQFTCRTGRCIRKELRCDGWADCTDHSDELNCSCDAGHQFTCKNKFCKPLFWVCDSVNDCGDNSDEQGCSCPAQTFRCSNGKCLSKSQQCNGKDDCGDGSDEASCPKVNVVTCTKHTYRCLNGLCLSKGNPECDGKEDCSDGSDEKDCDCGLRSFTRQARVVGGTDADEGEWPWQVSLHALGQGHICGASLISPNWLVSAAHCYIDDRGFRYSDPTQWTAFLGLHDQSQRSAPGVQERRLKRIISHPFFNDFTFDYDIALLELEKPAEYSSMVRPICLPDASHVFPAGKAIWVTGWGHTQYEGTGALILQKGEIRVINQTTCENLLPQQITPRMMCVGFLSGGVDSCQGDSGGPLSSVEADGRIFQAGVVSWGDGCAQRNKPGVYTRLPLFRDWIKENTGV

SEQ ID NO: 623 - protein, 855 aa, Homo sapiens
  Mutant MT-SP1 sequence; full length
  CB0080
MGSDRARKGGGGPKDFGAGLKYNSRHEKVNGLEEGVEFLPVNNVKKVEKHGPGRWVVLAAVLIGLLLVLLGIGFLVWHLQYRDVRVQKVFNGYMRITNENFVDAYENSNSTEFVSLASKVKDALKLLYSGVPFLGPYHKESAVTAFSEGSVIAYYWSEFSIPQHLVEEAERVMAEERVVMLPPRARSLKSFVVTSVVAFPTDSKTVQRTQDNSCSFGLHARGVELMRFTTPGFPDSPYPAHARCQWALRGDADSVLSLTFRSFDLASCDERGSDLVTVYNTLSPMEPHALVQLCGTYPPSYNLTFHSSQNVLLITLITNTERRHPGFEATFFQLPRMSSCGGRLRKAQGTFNSPYYPGHYPPNIDCTWNIEVPNNQHVKVRFKFFYLLEPGVPAGTCPKDYVEINGEKYCGERSQFVVTSNSNKITVRFHSDQSYTDTGFLAEYLSYDSSDPCPGQFTCRTGRCIRKELRCDGWADCTDHSDELNCSCDAGHQFTCKNKFCKPLFWVCDSVNDCGDNSDEQGCSCPAQTFRCSNGKCLSKSQQCNGKDDCGDGSDEASCPKVNVVTCTKHTYRCLNGLCLSKGNPECDGKEDCSDGSDEKDCDCGLRSFTRQARVVGGTDADEGEWPWQVSLHALGQGHICGASLISPNWLVSAAHCYIDDDGFRYSDPTQWTAFLGLHDQSQRSAPGVQERRLKRIISHPFFNDFTFDYDIALLELEKPAEYSSMVRPICLPDASHVFPAGKAIWVTGWGHTQYGGTGALILQKGEIRVINQTTCENLLPQQITPRMMCVGFLSGGVDSCQGDSGGPLSSVEADGRIFQAGVVSWGDGCAQRNKPGVYTRLPLFRDWIKENTGV

SEQ ID NO: 624 - protein, 855 aa, Homo sapiens
  Mutant MT-SP1 sequence; full length
  CB0367
MGSDRARKGGGGPKDFGAGLKYNSRHEKVNGLEEGVEFLPVNNVKKVEKHGPGRWVVLAAVLIGLLLVLLGIGFLVWHLQYRDVRVQKVFNGYMRITNENFVDAYENSNSTEFVSLASKVKDALKLLYSGVPFLGPYHKESAVTAFSEGSVIAYYWSEFSIPQHLVEEAERVMAEERVVMLPPRARSLKSFVVTSVVAFPTDSKTVQRTQDNSCSFGLHARGVELMRFTTPGFPDSPYPAHARCQWALRGDADSVLSLTFRSFDLASCDERGSDLVTVYNTLSPMEPHALVQLCGTYPPSYNLTFHSSQNVLLITLITNTERRHPGFEATFFQLPRMSSCGGRLRKAQGTFNSPYYPGHYPPNIDCTWNIEVPNNQHVKVRFKFFYLLEPGVPAGTCPKDYVEINGEKYCGERSQFVVTSNSNKITVRFHSDQSYTDTGFLAEYLSYDSSDPCPGQFTCRTGRCIRKELRCDGWADCTDHSDELNCSCDAGHQFTCKNKFCKPLFWVCDSVNDCGDNSDEQGCSCPAQTFRCSNGKCLSKSQQCNGKDDCGDGSDEASCPKVNVVTCTKHTYRCLNGLCLSKGNPECDGKEDCSDGSDEKDCDCGLRSFTRQARVVGGTDADEGEWPWQVSLHALGQGHICGASLISPNWLVSAAHCYIDDRGFRYSDPTQWTAFLGLHDQSQRSAPGVQERRLKRIISHPFFNDFTFDYDIALLELEKPAEYSSMVRPICLPDASHVFPAGKAIWVTGWGHTQDGGTGALILQKGEIRVINQTTCENLLPQDITPRMMCVGFLSGGVDSCQGDSGGPLSSVEADGRIFQAGVVSWGDGCAQRNRPGVYTRLPLFRDWIKENTGV

SEQ ID NO: 625 - protein, 855 aa, Homo sapiens
  Mutant MT-SP1 sequence; full length
  CB0383
MGSDRARKGGGGPKDFGAGLKYNSRHEKVNGLEEGVEFLPVNNVKKVEKHGPGRWVVLAAVLIGLLLVLLGIGFLVWHLQYRDVRVQKVFNGYMRITNENFVDAYENSNSTEFVSLASKVKDALKLLYSGVPFLGPYHKESAVTAFSEGSVIAYYWSEFSIPQHLVEEAERVMAEERVVMLPPRARSLKSFVVTSVVAFPTDSKTVQRTQDNSCSFGLHARGVELMRFTTPGFPDSPYPAHARCQWALRGDADSVLSLTFRSFDLASCDERGSDLVTVYNTLSPMEPHALVQLCGTYPPSYNLTFHSSQNVLLITLITNTERRHPGFEATFFQLPRMSSCGGRLRKAQGTFNSPYYPGHYPPNIDCTWNIEVPNNQHVKVRFKFFYLLEPGVPAGTCPKDYVEINGEKYCGERSQFVVTSNSNKITVRFHSDQSYTDTGFLAEYLSYDSSDPCPGQFTCRTGRCIRKELRCDGWADCTDHSDELNCSCDAGHQFTCKNKFCKPLFWVCDSVNDCGDNSDEQGCSCPAQTFRCSNGKCLSKSQQCNGKDDCGDGSDEASCPKVNVVTCTKHTYRCLNGLCLSKGNPECDGKEDCSDGSDEKDCDCGLRSFTRQARVVGGTDADEGEWPWQVSLHALGQGHICGASLISPNWLVSAAHCYIDDRGFRYSDPTQWTAFLGLHDQSQRSAPGVQERRLKRIISHPFFNDFTFDYDIALLELEKPAEYSSMVRPICLPDASHVFPAGKAIWVTGWGHTQDGGTGALILQKGEIRVINQTTCENLLPQLITPRMMCVGFLSGGVDSCQGDSGGPLSSVEADGRIFQAGVVSWGDGCAQRNLPGVYTRLPLFRDWIKENTGV

SEQ ID NO: 626 - protein, 855 aa, Homo sapiens
  Mutant MT-SP1 sequence; full length
  CB0357
MGSDRARKGGGGPKDFGAGLKYNSRHEKVNGLEEGVEFLPVNNVKKVEKHGPGRWVVLAAVLIGLLLVLLGIGFLVWHLQYRDVRVQKVFNGYMRITNENFVDAYENSNSTEFVSLASKVKDALKLLYSGVPFLGPYHKESAVTAFSEGSVIAYYWSEFSIPQHLVEEAERVMAEERVVMLPPRARSLKSFVVTSVVAFPTDSKTVQRTQDNSCSFGLHARGVELMRFTTPGFPDSPYPAHARCQWALRGDADSVLSLTFRSFDLASCDERGSDLVTVYNTLSPMEPHALVQLCGTYPPSYNLTFHSSQNVLLITLITNTERRHPGFEATFFQLPRMSSCGGRLRKAQGTFNSPYYPGHYPPNIDCTWNIEVPNNQHVKVRFKFFYLLEPGVPAGTCPKDYVEINGEKYCGERSQFVVTSNSNKITVRFHSDQSYTDTGFLAEYLSYDSSDPCPGQFTCRTGRCIRKELRCDGWADCTDHSDELNCSCDAGHQFTCKNKFCKPLFWVCDSVNDCGDNSDEQGCSCPAQTFRCSNGKCLSKSQQCNGKDDCGDGSDEASCPKVNVVTCTKHTYRCLNGLCLSKGNPECDGKEDCSDGSDEKDCDCGLRSFTRQARVVGGTDADEGEWPWQVSLHALGQGHTCGASLISPNWLVSAAHCYIDDRGFRYSDPTQWTAFLGLHDQSQRSAPGVQERRLKRIISHPFFNDFTFDYDIALLELEKPAEYSSMVRPICLPDASHVFPAGKAIWVTGWGHTQDGGTGALILQKGEIRVINQTTCENLLPQQITPRMMCVGFLSGGVDSCQGDSGGPLSSVEADGRIFQAGVVSWGDGCAQRNLPGVYTRLPLFRDWIKENTGV

SEQ ID NO: 627 - protein, 855 aa, Homo sapiens
  Mutant MT-SP1 sequence; full length
  CB0387
MGSDRARKGGGGPKDFGAGLKYNSRHEKVNGLEEGVEFLPVNNVKKVEKHGPGRWVVLAAVLIGLLLVLLGIGFLVWHLQYRDVRVQKVFNGYMRITNENFVDAYENSNSTEFVSLASKVKDALKLLYSGVPFLGPYHKESAVTAFSEGSVIAYYWSEFSIPQHLVEEAERVMAEERVVMLPPRARSLKSFVVTSVVAFPTDSKTVQRTQDNSCSFGLHARGVELMRFTTPGFPDSPYPAHARCQWALRGDADSVLSLTFRSFDLASCDERGSDLVTVYNTLSPMEPHALVQLCGTYPPSYNLTFHSSQNVLLITLITNTERRHPGFEATFFQLPRMSSCGGRLRKAQGTFNSPYYPGHYPPNIDCTWNIEVPNNQHVKVRFKFFYLLEPGVPAGTCPKDYVEINGEKYCGERSQFVVTSNSNKITVRFHSDQSYTDTGFLAEYLSYDSSDPCPGQFTCRTGRCIRKELRCDGWADCTDHSDELNCSCDAGHQFTCKNKFCKPLFWVCDSVNDCGDNSDEQGCSCPAQTFRCSNGKCLSKSQQCNGKDDCGDGSDEASCPKVNVVTCTKHTYRCLNGLCLSKGNPECDGKEDCSDGSDEKDCDCGLRSFTRQARVVGGTDADEGEWPWQVSLHALGQGHICGASLISPNWLVSAAHCYIDDRGFRYSDPTQWTAFLGLHDQSQRSAPGVQERRLKRIISHPFFNDFTFDYDIALLELEKPAEYSSMVRPICLPDASHVFPAGKAIWVTGWGHTQDGGTGALILQKGEIRVINQTTCENLLPQWITPRMMCVGFLSGGVDSCQGDSGGPLSSVEADGRIFQAGVVSWGDGCAQRNLPGVYTRLPLFRDWIKENTGV

SEQ ID NO: 628 - protein, 855 aa, Homo sapiens
  Mutant MT-SP1 sequence; full length
  CB0238
MGSDRARKGGGGPKDFGAGLKYNSRHEKVNGLEEGVEFLPVNNVKKVEKHGPGRWVVLAAVLIGLLLVLLGIGFLVWHLQYRDVRVQKVFNGYMRITNENFVDAYENSNSTEFVSLASKVKDALKLLYSGVPFLGPYHKESAVTAFSEGSVIAYYWSEFSIPQHLVEEAERVMAEERVVMLPPRARSLKSFVVTSVVAFPTDSKTVQRTQDNSCSFGLHARGVELMRFTTPGFPDSPYPAHARCQWALRGDADSVLSLTFRSFDLASCDERGSDLVTVYNTLSPMEPHALVQLCGTYPPSYNLTFHSSQNVLLITLITNTERRHPGFEATFFQLPRMSSCGGRLRKAQGTFNSPYYPGHYPPNIDCTWNIEVPNNQHVKVRFKFFYLLEPGVPAGTCPKDYVEINGEKYCGERSQFVVTSNSNKITVRFHSDQSYTDTGFLAEYLSYDSSDPCPGQFTCRTGRCIRKELRCDGWADCTDHSDELNCSCDAGHQFTCKNKFCKPLFWVCDSVNDCGDNSDEQGCSCPAQTFRCSNGKCLSKSQQCNGKDDCGDGSDEASCPKVNVVTCTKHTYRCLNGLCLSKGNPECDGKEDCSDGSDEKDCDCGLRSFTRQARVVGGTDADEGEWPWQVSLHALGQGHICGASLISPNWLVSAAHCYIDDRGFRYSDPTQWTAFLGLHDQSQRSAPGVQERRLKRIISHPFFNDFTFDYDIALLELEKPAEYSSMVRPICLPDASHVFPAGKAIWVTGWGHTQDGGTGALILQKGEIRVINQTTCENLLPQQITPRMMCVGFLSGGVDSCQGDSGGPLSSVEADGRIFQAGVVSWGDGCAQRNLPGVYTRLPLFRDWIKENTGV

SEQ ID NO: 629 - protein, 855 aa, Homo sapiens
  Mutant MT-SP1 sequence; full length
  CB0458
MGSDRARKGGGGPKDFGAGLKYNSRHEKVNGLEEGVEFLPVNNVKKVEKHGPGRWVVLAAVLIGLLLVLLGIGFLVWHLQYRDVRVQKVFNGYMRITNENFVDAYENSNSTEFVSLASKVKDALKLLYSGVPFLGPYHKESAVTAFSEGSVIAYYWSEFSIPQHLVEEAERVMAEERVVMLPPRARSLKSFVVTSVVAFPTDSKTVQRTQDNSCSFGLHARGVELMRFTTPGFPDSPYPAHARCQWALRGDADSVLSLTFRSFDLASCDERGSDLVTVYNTLSPMEPHALVQLCGTYPPSYNLTFHSSQNVLLITLITNTERRHPGFEATFFQLPRMSSCGGRLRKAQGTFNSPYYPGHYPPNIDCTWNIEVPNNQHVKVRFKFFYLLEPGVPAGTCPKDYVEINGEKYCGERSQFVVTSNSNKITVRFHSDQSYTDTGFLAEYLSYDSSDPCPGQFTCRTGRCIRKELRCDGWADCTDHSDELNCSCDAGHQFTCKNKFCKPLFWVCDSVNDCGDNSDEQGCSCPAQTFRCSNGKCLSKSQQCNGKDDCGDGSDEASCPKVNVVTCTKHTYRCLNGLCLSKGNPECDGKEDCSDGSDEKDCDCGLRSFTRQARVVGGTDADEGEWPWQVSLHALGQGHICGASLISPNWLVSAAHCYIDDRGFRYSDPTQWTAFLGLHDQSQRSAPGVQERRLKRIISHPFFNDFTFDYDIALLELEKPAEYSSMVRPICLPDASHVFPAGKAIWVTGWGHTQEGGTGALILQKGEIRVINQTTCENLLPQQITPRMMCVGFLSGGVDSCQGDSGGPLSSVEADGRIFQAGVVSWGDGCAERNRPGVYTRLPLFRDWIKENTGV

SEQ ID NO: 630 - protein, 855 aa, Homo sapiens
  Mutant MT-SP1 sequence; full length
  CB0235
MGSDRARKGGGGPKDFGAGLKYNSRHEKVNGLEEGVEFLPVNNVKKVEKHGPGRWVVLAAVLIGLLLVLLGIGFLVWHLQYRDVRVQKVFNGYMRITNENFVDAYENSNSTEFVSLASKVKDALKLLYSGVPFLGPYHKESAVTAFSEGSVIAYYWSEFSIPQHLVEEAERVMAEERVVMLPPRARSLKSFVVTSVVAFPTDSKTVQRTQDNSCSFGLHARGVELMRFTTPGFPDSPYPAHARCQWALRGDADSVLSLTFRSFDLASCDERGSDLVTVYNTLSPMEPHALVQLCGTYPPSYNLTFHSSQNVLLITLITNTERRHPGFEATFFQLPRMSSCGGRLRKAQGTFNSPYYPGHYPPNIDCTWNIEVPNNQHVKVRFKFFYLLEPGVPAGTCPKDYVEINGEKYCGERSQFVVTSNSNKITVRFHSDQSYTDTGFLAEYLSYDSSDPCPGQFTCRTGRCIRKELRCDGWADCTDHSDELNCSCDAGHQFTCKNKFCKPLFWVCDSVNDCGDNSDEQGCSCPAQTFRCSNGKCLSKSQQCNGKDDCGDGSDEASCPKVNVVTCTKHTYRCLNGLCLSKGNPECDGKEDCSDGSDEKDCDCGLRSFTRQARVVGGTDADEGEWPWQVSLHALGQGHICGASLISPNWLVSAAHCYIDDRGFRYSDPTQWTAFLGLHDQSQRSAPGVQERRLKRIISHPFFNDFTFDYDIALLELEKPAEYSSMVRPICLPDASHVFPAGKAIWVTGWGHTQEGGTGALILQKGEIRVINQTTCENLLPQQITPRMMCVGFLSGGVDSCQGDSGGPLSSVEADGRIFQAGVVSWGDGCAQRNAPGVYTRLPLFRDWIKENTGV

SEQ ID NO: 631 - protein, 855 aa, Homo sapiens
  Mutant MT-SP1 sequence; full length
  CB0381
MGSDRARKGGGGPKDFGAGLKYNSRHEKVNGLEEGVEFLPVNNVKKVEKHGPGRWVVLAAVLIGLLLVLLGIGFLVWHLQYRDVRVQKVFNGYMRITNENFVDAYENSNSTEFVSLASKVKDALKLLYSGVPFLGPYHKESAVTAFSEGSVIAYYWSEFSIPQHLVEEAERVMAEERVVMLPPRARSLKSFVVTSVVAFPTDSKTVQRTQDNSCSFGLHARGVELMRFTTPGFPDSPYPAHARCQWALRGDADSVLSLTFRSFDLASCDERGSDLVTVYNTLSPMEPHALVQLCGTYPPSYNLTFHSSQNVLLITLITNTERRHPGFEATFFQLPRMSSCGGRLRKAQGTFNSPYYPGHYPPNIDCTWNIEVPNNQHVKVRFKFFYLLEPGVPAGTCPKDYVEINGEKYCGERSQFVVTSNSNKITVRFHSDQSYTDTGFLAEYLSYDSSDPCPGQFTCRTGRCIRKELRCDGWADCTDHSDELNCSCDAGHQFTCKNKFCKPLFWVCDSVNDCGDNSDEQGCSCPAQTFRCSNGKCLSKSQQCNGKDDCGDGSDEASCPKVNVVTCTKHTYRCLNGLCLSKGNPECDGKEDCSDGSDEKDCDCGLRSFTRQARVVGGTDADEGEWPWQVSLHALGQGHICGASLISPNWLVSAAHCYIDDRGFRYSDPTQWTAFLGLHDQSQRSAPGVQERRLKRIISHPFFNDFTFDYDIALLELEKPAEYSSMVRPICLPDASHVFPAGKAIWVTGWGHTQDGGTGALILQKGEIRVINQTTCENLLPQHITPRMMCVGFLSGGVDSCQGDSGGPLSSVEADGRIFQAGVVSWGDGCAQRNLPGVYTRLPLFRDWIKENTGV

SEQ ID NO: 632 - protein, 855 aa, Homo sapiens
  Mutant MT-SP1 sequence; full length
  CB0388
MGSDRARKGGGGPKDFGAGLKYNSRHEKVNGLEEGVEFLPVNNVKKVEKHGPGRWVVLAAVLIGLLLVLLGIGFLVWHLQYRDVRVQKVFNGYMRITNENFVDAYENSNSTEFVSLASKVKDALKLLYSGVPFLGPYHKESAVTAFSEGSVIAYYWSEFSIPQHLVEEAERVMAEERVVMLPPRARSLKSFVVTSVVAFPTDSKTVQRTQDNSCSFGLHARGVELMRFTTPGFPDSPYPAHARCQWALRGDADSVLSLTFRSFDLASCDERGSDLVTVYNTLSPMEPHALVQLCGTYPPSYNLTFHSSQNVLLITLITNTERRHPGFEATFFQLPRMSSCGGRLRKAQGTFNSPYYPGHYPPNIDCTWNIEVPNNQHVKVRFKFFYLLEPGVPAGTCPKDYVEINGEKYCGERSQFVVTSNSNKITVRFHSDQSYTDTGFLAEYLSYDSSDPCPGQFTCRTGRCIRKELRCDGWADCTDHSDELNCSCDAGHQFTCKNKFCKPLFWVCDSVNDCGDNSDEQGCSCPAQTFRCSNGKCLSKSQQCNGKDDCGDGSDEASCPKVNVVTCTKHTYRCLNGLCLSKGNPECDGKEDCSDGSDEKDCDCGLRSFTRQARVVGGTDADEGEWPWQVSLHALGQGHICGASLISPNWLVSAAHCYIDDRGFRYSDPTQWTAFLGLHDQSQRSAPGVQERRLKRIISHPFFNDFTFDYDIALLELEKPAEYSSMVRPICLPDASHVFPAGKAIWVTGWGHTQDGGTGALILQKGEIRVINQTTCENLLPQYITPRMMCVGFLSGGVDSCQGDSGGPLSSVEADGRIFQAGVVSWGDGCAQRNLPGVYTRLPLFRDWIKENTGV

SEQ ID NO: 633 - protein, 855 aa, Homo sapiens
  Mutant MT-SP1 sequence; full length
  CB0257
MGSDRARKGGGGPKDFGAGLKYNSRHEKVNGLEEGVEFLPVNNVKKVEKHGPGRWVVLAAVLIGLLLVLLGIGFLVWHLQYRDVRVQKVFNGYMRITNENFVDAYENSNSTEFVSLASKVKDALKLLYSGVPFLGPYHKESAVTAFSEGSVIAYYWSEFSIPQHLVEEAERVMAEERVVMLPPRARSLKSFVVTSVVAFPTDSKTVQRTQDNSCSFGLHARGVELMRFTTPGFPDSPYPAHARCQWALRGDADSVLSLTFRSFDLASCDERGSDLVTVYNTLSPMEPHALVQLCGTYPPSYNLTFHSSQNVLLITLITNTERRHPGFEATFFQLPRMSSCGGRLRKAQGTFNSPYYPGHYPPNIDCTWNIEVPNNQHVKVRFKFFYLLEPGVPAGTCPKDYVEINGEKYCGERSQFVVTSNSNKITVRFHSDQSYTDTGFLAEYLSYDSSDPCPGQFTCRTGRCIRKELRCDGWADCTDHSDELNCSCDAGHQFTCKNKFCKPLFWVCDSVNDCGDNSDEQGCSCPAQTFRCSNGKCLSKSQQCNGKDDCGDGSDEASCPKVNVVTCTKHTYRCLNGLCLSKGNPECDGKEDCSDGSDEKDCDCGLRSFTRQARVVGGTDADEGEWPWQVSLHALGQGHICGASLISPNWLVSAAHCYIDDRGFRYSDPTQWTAFLGLHDQSQRSAPGVQERRLKRIISHPFFNDFTFDYDIALLELEKPAEYSSMVRPICLPDASHVFPAGKAIWVTGWGHTQEGGTGALILQKGEIRVINQTTCENLLPQQITPRMMCVGFLSGGVDSCQGDSGGPLSSVEADGRIFQAGVVSWGDGCAQRNYPGVYTRLPLFRDWIKENTGV

SEQ ID NO: 634 - protein, 855 aa, Homo sapiens
  Mutant MT-SP1 sequence; full length
  CB0385
MGSDRARKGGGGPKDFGAGLKYNSRHEKVNGLEEGVEFLPVNNVKKVEKHGPGRWVVLAAVLIGLLLVLLGIGFLVWHLQYRDVRVQKVFNGYMRITNENFVDAYENSNSTEFVSLASKVKDALKLLYSGVPFLGPYHKESAVTAFSEGSVIAYYWSEFSIPQHLVEEAERVMAEERVVMLPPRARSLKSFVVTSVVAFPTDSKTVQRTQDNSCSFGLHARGVELMRFTTPGFPDSPYPAHARCQWALRGDADSVLSLTFRSFDLASCDERGSDLVTVYNTLSPMEPHALVQLCGTYPPSYNLTFHSSQNVLLITLITNTERRHPGFEATFFQLPRMSSCGGRLRKAQGTFNSPYYPGHYPPNIDCTWNIEVPNNQHVKVRFKFFYLLEPGVPAGTCPKDYVEINGEKYCGERSQFVVTSNSNKITVRFHSDQSYTDTGFLAEYLSYDSSDPCPGQFTCRTGRCIRKELRCDGWADCTDHSDELNCSCDAGHQFTCKNKFCKPLFWVCDSVNDCGDNSDEQGCSCPAQTFRCSNGKCLSKSQQCNGKDDCGDGSDEASCPKVNVVTCTKHTYRCLNGLCLSKGNPECDGKEDCSDGSDEKDCDCGLRSFTRQARVVGGTDADEGEWPWQVSLHALGQGHICGASLISPNWLVSAAHCYIDDRGFRYSDPTQWTAFLGLHDQSQRSAPGVQERRLKRIISHPFFNDFTFDYDIALLELEKPAEYSSMVRPICLPDASHVFPAGKAIWVTGWGHTQDGGTGALILQKGEIRVINQTTCENLLPQFITPRMMCVGFLSGGVDSCQGDSGGPLSSVEADGRIFQAGVVSWGDGCAQRNLPGVYTRLPLFRDWIKENTGV

SEQ ID NO: 635 - protein, 855 aa, Homo sapiens
  Mutant MT-SP1 sequence; full length
  CB0021
MGSDRARKGGGGPKDFGAGLKYNSRHEKVNGLEEGVEFLPVNNVKKVEKHGPGRWVVLAAVLIGLLLVLLGIGFLVWHLQYRDVRVQKVFNGYMRITNENFVDAYENSNSTEFVSLASKVKDALKLLYSGVPFLGPYHKESAVTAFSEGSVIAYYWSEFSIPQHLVEEAERVMAEERVVMLPPRARSLKSFVVTSVVAFPTDSKTVQRTQDNSCSFGLHARGVELMRFTTPGFPDSPYPAHARCQWALRGDADSVLSLTFRSFDLASCDERGSDLVTVYNTLSPMEPHALVQLCGTYPPSYNLTFHSSQNVLLITLITNTERRHPGFEATFFQLPRMSSCGGRLRKAQGTFNSPYYPGHYPPNIDCTWNIEVPNNQHVKVRFKFFYLLEPGVPAGTCPKDYVEINGEKYCGERSQFVVTSNSNKITVRFHSDQSYTDTGFLAEYLSYDSSDPCPGQFTCRTGRCIRKELRCDGWADCTDHSDELNCSCDAGHQFTCKNKFCKPLFWVCDSVNDCGDNSDEQGCSCPAQTFRCSNGKCLSKSQQCNGKDDCGDGSDEASCPKVNVVTCTKHTYRCLNGLCLSKGNPECDGKEDCSDGSDEKDCDCGLRSFTRQARVVGGTDADEGEWPWQVSLHALGQGHICGASLISPNWLVSAAHCYIDDRGFRYSDPTQWTAFLGLHDQSQRSAPGVQERRLKRIISHPFFNDFTFDYDIALLELEKPAEYSSMVRPICLPDASHVFPAGKAIWVTGWGHTQYGGTGALILQKGEIRVINQTTCENLLPQEITPRMMCVGFLSGGVDSCQGDSGGPLSSVEADGRIFQAGVVSWGDGCAQRNKPGVYTRLPLFRDWIKENTGV

SEQ ID NO: 636 - protein, 855 aa, Homo sapiens
  Mutant MT-SP1 sequence; full length
  CB0020
MGSDRARKGGGGPKDFGAGLKYNSRHEKVNGLEEGVEFLPVNNVKKVEKHGPGRWVVLAAVLIGLLLVLLGIGFLVWHLQYRDVRVQKVFNGYMRITNENFVDAYENSNSTEFVSLASKVKDALKLLYSGVPFLGPYHKESAVTAFSEGSVIAYYWSEFSIPQHLVEEAERVMAEERVVMLPPRARSLKSFVVTSVVAFPTDSKTVQRTQDNSCSFGLHARGVELMRFTTPGFPDSPYPAHARCQWALRGDADSVLSLTFRSFDLASCDERGSDLVTVYNTLSPMEPHALVQLCGTYPPSYNLTFHSSQNVLLITLITNTERRHPGFEATFFQLPRMSSCGGRLRKAQGTFNSPYYPGHYPPNIDCTWNIEVPNNQHVKVRFKFFYLLEPGVPAGTCPKDYVEINGEKYCGERSQFVVTSNSNKITVRFHSDQSYTDTGFLAEYLSYDSSDPCPGQFTCRTGRCIRKELRCDGWADCTDHSDELNCSCDAGHQFTCKNKFCKPLFWVCDSVNDCGDNSDEQGCSCPAQTFRCSNGKCLSKSQQCNGKDDCGDGSDEASCPKVNVVTCTKHTYRCLNGLCLSKGNPECDGKEDCSDGSDEKDCDCGLRSFTRQARVVGGTDADEGEWPWQVSLHALGQGHICGASLISPNWLVSAAHCYIDDRGFRYSDPTQWTAFLGLHDQSQRSAPGVQERRLKRIISHPFFNDFTFDYDIALLELEKPAEYSSMVRPICLPDASHVFPAGKAIWVTGWGHTQYGGTGALILQKGEIRVINQTTCENLLPQDITPRMMCVGFLSGGVDSCQGDSGGPLSSVEADGRIFQAGVVSWGDGCAQRNKPGVYTRLPLFRDWIKENTGV

SEQ ID NO: 637 - protein, 855 aa, Homo sapiens
  Mutant MT-SP1 sequence; full length
  CB0245
MGSDRARKGGGGPKDFGAGLKYNSRHEKVNGLEEGVEFLPVNNVKKVEKHGPGRWVVLAAVLIGLLLVLLGIGFLVWHLQYRDVRVQKVFNGYMRITNENFVDAYENSNSTEFVSLASKVKDALKLLYSGVPFLGPYHKESAVTAFSEGSVIAYYWSEFSIPQHLVEEAERVMAEERVVMLPPRARSLKSFVVTSVVAFPTDSKTVQRTQDNSCSFGLHARGVELMRFTTPGFPDSPYPAHARCQWALRGDADSVLSLTFRSFDLASCDERGSDLVTVYNTLSPMEPHALVQLCGTYPPSYNLTFHSSQNVLLITLITNTERRHPGFEATFFQLPRMSSCGGRLRKAQGTFNSPYYPGHYPPNIDCTWNIEVPNNQHVKVRFKFFYLLEPGVPAGTCPKDYVEINGEKYCGERSQFVVTSNSNKITVRFHSDQSYTDTGFLAEYLSYDSSDPCPGQFTCRTGRCIRKELRCDGWADCTDHSDELNCSCDAGHQFTCKNKFCKPLFWVCDSVNDCGDNSDEQGCSCPAQTFRCSNGKCLSKSQQCNGKDDCGDGSDEASCPKVNVVTCTKHTYRCLNGLCLSKGNPECDGKEDCSDGSDEKDCDCGLRSFTRQARVVGGTDADEGEWPWQVSLHALGQGHICGASLISPNWLVSAAHCYIDDRGFRYSDPTQWTAFLGLHDQSQRSAPGVQERRLKRIISHPFFNDFTFDYDIALLELEKPAEYSSMVRPICLPDASHVFPAGKAIWVTGWGHTQDGGTGALILQKGEIRVINQTTCENLLPQQITPRMMCVGFLSGGVDSCQGDSGGPLSSVEADGRIFQAGVVSWGDGCAQRNNPGVYTRLPLFRDWIKENTGV

SEQ ID NO: 638 - protein, 855 aa, Homo sapiens
  Mutant MT-SP1 sequence; full length
  CB0451
MGSDRARKGGGGPKDFGAGLKYNSRHEKVNGLEEGVEFLPVNNVKKVEKHGPGRWVVLAAVLIGLLLVLLGIGFLVWHLQYRDVRVQKVFNGYMRITNENFVDAYENSNSTEFVSLASKVKDALKLLYSGVPFLGPYHKESAVTAFSEGSVIAYYWSEFSIPQHLVEEAERVMAEERVVMLPPRARSLKSFVVTSVVAFPTDSKTVQRTQDNSCSFGLHARGVELMRFTTPGFPDSPYPAHARCQWALRGDADSVLSLTFRSFDLASCDERGSDLVTVYNTLSPMEPHALVQLCGTYPPSYNLTFHSSQNVLLITLITNTERRHPGFEATFFQLPRMSSCGGRLRKAQGTFNSPYYPGHYPPNIDCTWNIEVPNNQHVKVRFKFFYLLEPGVPAGTCPKDYVEINGEKYCGERSQFVVTSNSNKITVRFHSDQSYTDTGFLAEYLSYDSSDPCPGQFTCRTGRCIRKELRCDGWADCTDHSDELNCSCDAGHQFTCKNKFCKPLFWVCDSVNDCGDNSDEQGCSCPAQTFRCSNGKCLSKSQQCNGKDDCGDGSDEASCPKVNVVTCTKHTYRCLNGLCLSKGNPECDGKEDCSDGSDEKDCDCGLRSFTRQARVVGGTDADEGEWPWQVSLHALGQGHICGASLISPNWLVSAAHCYIDDRGFRYSDPTQWTAFLGLHDQSQRSAPGVQERRLKRIISHPFFNDFTFDYDIALLELEKPAEYSSMVRPICLPDASHVFPAGKAIWVTGWGHTQDGGTGALILQKGEIRVINQTTCENLLPQQITPRMMCVGFLSGGVDSCQGDSGGPLSSVEADGRIFQAGVVSWGDGCALRNSPGVYTRLPLFRDWIKENTGV

SEQ ID NO: 639 - protein, 855 aa, Homo sapiens
  Mutant MT-SP1 sequence; full length
  CB0332
MGSDRARKGGGGPKDFGAGLKYNSRHEKVNGLEEGVEFLPVNNVKKVEKHGPGRWVVLAAVLIGLLLVLLGIGFLVWHLQYRDVRVQKVFNGYMRITNENFVDAYENSNSTEFVSLASKVKDALKLLYSGVPFLGPYHKESAVTAFSEGSVIAYYWSEFSIPQHLVEEAERVMAEERVVMLPPRARSLKSFVVTSVVAFPTDSKTVQRTQDNSCSFGLHARGVELMRFTTPGFPDSPYPAHARCQWALRGDADSVLSLTFRSFDLASCDERGSDLVTVYNTLSPMEPHALVQLCGTYPPSYNLTFHSSQNVLLITLITNTERRHPGFEATFFQLPRMSSCGGRLRKAQGTFNSPYYPGHYPPNIDCTWNIEVPNNQHVKVRFKFFYLLEPGVPAGTCPKDYVEINGEKYCGERSQFVVTSNSNKITVRFHSDQSYTDTGFLAEYLSYDSSDPCPGQFTCRTGRCIRKELRCDGWADCTDHSDELNCSCDAGHQFTCKNKFCKPLFWVCDSVNDCGDNSDEQGCSCPAQTFRCSNGKCLSKSQQCNGKDDCGDGSDEASCPKVNVVTCTKHTYRCLNGLCLSKGNPECDGKEDCSDGSDEKDCDCGLRSFTRQARVVGGTDADEGEWPWQVSLHALGQGHECGASLISPNWLVSAAHCYIDDRGFRYSDPTQWTAFLGLHDQSQRSAPGVQERRLKRIISHPFFNDFTFDYDIALLELEKPAEYSSMVRPICLPDASHVFPAGKAIWVTGWGHTQDGGTGALILQKGEIRVINQTTCENLLPQQITPRMMCVGFLSGGVDSCQGDSGGPLSSVEADGRIFQAGVVSWGDGCAQRNLPGVYTRLPLFRDWIKENTGV

SEQ ID NO: 640 - protein, 855 aa, Homo sapiens
  Mutant MT-SP1 sequence; full length
  CB0403
MGSDRARKGGGGPKDFGAGLKYNSRHEKVNGLEEGVEFLPVNNVKKVEKHGPGRWVVLAAVLIGLLLVLLGIGFLVWHLQYRDVRVQKVFNGYMRITNENFVDAYENSNSTEFVSLASKVKDALKLLYSGVPFLGPYHKESAVTAFSEGSVIAYYWSEFSIPQHLVEEAERVMAEERVVMLPPRARSLKSFVVTSVVAFPTDSKTVQRTQDNSCSFGLHARGVELMRFTTPGFPDSPYPAHARCQWALRGDADSVLSLTFRSFDLASCDERGSDLVTVYNTLSPMEPHALVQLCGTYPPSYNLTFHSSQNVLLITLITNTERRHPGFEATFFQLPRMSSCGGRLRKAQGTFNSPYYPGHYPPNIDCTWNIEVPNNQHVKVRFKFFYLLEPGVPAGTCPKDYVEINGEKYCGERSQFVVTSNSNKITVRFHSDQSYTDTGFLAEYLSYDSSDPCPGQFTCRTGRCIRKELRCDGWADCTDHSDELNCSCDAGHQFTCKNKFCKPLFWVCDSVNDCGDNSDEQGCSCPAQTFRCSNGKCLSKSQQCNGKDDCGDGSDEASCPKVNVVTCTKHTYRCLNGLCLSKGNPECDGKEDCSDGSDEKDCDCGLRSFTRQARVVGGTDADEGEWPWQVSLHALGQGHICGASLISPNWLVSAAHCYIDDRGFRYSDPTQWTAFLGLHDQSQRSAPGVQERRLKRIISHPFFNDFTFDYDIALLELEKPAEYSSMVRPICLPDASHVFPAGKAIWVTGWGHTQDGGTGALILQKGEIRVINQTTCENLLPQQITPRMMCVGFLSGGVDSCQGDSGGPLSSVEADGRIFQAGVVSWGFGCAQRNLPGVYTRLPLFRDWIKENTGV

SEQ ID NO: 641 - protein, 856 aa, Homo sapiens
  Mutant MT-SP1 sequence; full length
  CB0353
MGSDRARKGGGGPKDFGAGLKYNSRHEKVNGLEEGVEFLPVNNVKKVEKHGPGRWVVLAAVLIGLLLVLLGIGFLVWHLQYRDVRVQKVFNGYMRITNENFVDAYENSNSTEFVSLASKVKDALKLLYSGVPFLGPYHKESAVTAFSEGSVIAYYWSEFSIPQHLVEEAERVMAEERVVMLPPRARSLKSFVVTSVVAFPTDSKTVQRTQDNSCSFGLHARGVELMRFTTPGFPDSPYPAHARCQWALRGDADSVLSLTFRSFDLASCDERGSDLVTVYNTLSPMEPHALVQLCGTYPPSYNLTFHSSQNVLLITLITNTERRHPGFEATFFQLPRMSSCGGRLRKAQGTFNSPYYPGHYPPNIDCTWNIEVPNNQHVKVRFKFFYLLEPGVPAGTCPKDYVEINGEKYCGERSQFVVTSNSNKITVRFHSDQSYTDTGFLAEYLSYDSSDPCPGQFTCRTGRCIRKELRCDGWADCTDHSDELNCSCDAGHQFTCKNKFCKPLFWVCDSVNDCGDNSDEQGCSCPAQTFRCSNGKCLSKSQQCNGKDDCGDGSDEASCPKVNVVTCTKHTYRCLNGLCLSKGNPECDGKEDCSDGSDEKDCDCGLRSFTRQARVVGGTDADEGEWPWQVSLHALGQGHICGASLISPNWLVSAAHCYIDDRGFRYSDPTQWTAFLGLHDQSQRSAPGVQERRLKRIISHPFFNDFTFDYDIALLELEKPAEYSSMVRPICLPDASHVFPAGKAIWVTGWGVTQYDGGTGALILQKGEIRVINQTTCENLLPQQITPRMMCVGFLSGGVDSCQGDSGGPLSSVEADGRIFQAGVVSWGDGCAQRNFPGVYTRLPLFRDWIKENTGV

SEQ ID NO: 642 - protein, 855 aa, Homo sapiens
  Mutant MT-SP1 sequence; full length
  CB0213
MGSDRARKGGGGPKDFGAGLKYNSRHEKVNGLEEGVEFLPVNNVKKVEKHGPGRWVVLAAVLIGLLLVLLGIGFLVWHLQYRDVRVQKVFNGYMRITNENFVDAYENSNSTEFVSLASKVKDALKLLYSGVPFLGPYHKESAVTAFSEGSVIAYYWSEFSIPQHLVEEAERVMAEERVVMLPPRARSLKSFVVTSVVAFPTDSKTVQRTQDNSCSFGLHARGVELMRFTTPGFPDSPYPAHARCQWALRGDADSVLSLTFRSFDLASCDERGSDLVTVYNTLSPMEPHALVQLCGTYPPSYNLTFHSSQNVLLITLITNTERRHPGFEATFFQLPRMSSCGGRLRKAQGTFNSPYYPGHYPPNIDCTWNIEVPNNQHVKVRFKFFYLLEPGVPAGTCPKDYVEINGEKYCGERSQFVVTSNSNKITVRFHSDQSYTDTGFLAEYLSYDSSDPCPGQFTCRTGRCIRKELRCDGWADCTDHSDELNCSCDAGHQFTCKNKFCKPLFWVCDSVNDCGDNSDEQGCSCPAQTFRCSNGKCLSKSQQCNGKDDCGDGSDEASCPKVNVVTCTKHTYRCLNGLCLSKGNPECDGKEDCSDGSDEKDCDCGLRSFTRQARVVGGTDADEGEWPWQVSLHALGQGHICGASLISPNWLVSAAHCYIDDRGFRYSDPTQWTAFLGLHDQSQRSAPGVQERRLKRIISHPFFNDFTFDYDIALLELEKPAEYSSMVRPICLPDASHVFPAGKAIWVTGWGHTQEGGTGALILQKGEIRVINQTTCENLLPQQITPRMMCVGFLSGGVDSCQGDSGGPLSSVEADGRIFQAGVVSWGDGCAQRNFPGVYTRLPLFRDWIKENTGV

SEQ ID NO: 643 - protein, 855 aa, Homo sapiens
  Mutant MT-SP1 sequence; full length
  CB0214
MGSDRARKGGGGPKDFGAGLKYNSRHEKVNGLEEGVEFLPVNNVKKVEKHGPGRWVVLAAVLIGLLLVLLGIGFLVWHLQYRDVRVQKVFNGYMRITNENFVDAYENSNSTEFVSLASKVKDALKLLYSGVPFLGPYHKESAVTAFSEGSVIAYYWSEFSIPQHLVEEAERVMAEERVVMLPPRARSLKSFVVTSVVAFPTDSKTVQRTQDNSCSFGLHARGVELMRFTTPGFPDSPYPAHARCQWALRGDADSVLSLTFRSFDLASCDERGSDLVTVYNTLSPMEPHALVQLCGTYPPSYNLTFHSSQNVLLITLITNTERRHPGFEATFFQLPRMSSCGGRLRKAQGTFNSPYYPGHYPPNIDCTWNIEVPNNQHVKVRFKFFYLLEPGVPAGTCPKDYVEINGEKYCGERSQFVVTSNSNKITVRFHSDQSYTDTGFLAEYLSYDSSDPCPGQFTCRTGRCIRKELRCDGWADCTDHSDELNCSCDAGHQFTCKNKFCKPLFWVCDSVNDCGDNSDEQGCSCPAQTFRCSNGKCLSKSQQCNGKDDCGDGSDEASCPKVNVVTCTKHTYRCLNGLCLSKGNPECDGKEDCSDGSDEKDCDCGLRSFTRQARVVGGTDADEGEWPWQVSLHALGQGHICGASLISPNWLVSAAHCYIDDRGFRYSDPTQWTAFLGLHDQSQRSAPGVQERRLKRIISHPFFNDFTFDYDIALLELEKPAEYSSMVRPICLPDASHVFPAGKAIWVTGWGHTQAGGTGALILQKGEIRVINQTTCENLLPQQITPRMMCVGFLSGGVDSCQGDSGGPLSSVEADGRIFQAGVVSWGDGCAQRNFPGVYTRLPLFRDWIKENTGV

SEQ ID NO: 644 - protein, 855 aa, Homo sapiens
  Mutant MT-SP1 sequence; full length
  CB0255
MGSDRARKGGGGPKDFGAGLKYNSRHEKVNGLEEGVEFLPVNNVKKVEKHGPGRWVVLAAVLIGLLLVLLGIGFLVWHLQYRDVRVQKVFNGYMRITNENFVDAYENSNSTEFVSLASKVKDALKLLYSGVPFLGPYHKESAVTAFSEGSVIAYYWSEFSIPQHLVEEAERVMAEERVVMLPPRARSLKSFVVTSVVAFPTDSKTVQRTQDNSCSFGLHARGVELMRFTTPGFPDSPYPAHARCQWALRGDADSVLSLTFRSFDLASCDERGSDLVTVYNTLSPMEPHALVQLCGTYPPSYNLTFHSSQNVLLITLITNTERRHPGFEATFFQLPRMSSCGGRLRKAQGTFNSPYYPGHYPPNIDCTWNIEVPNNQHVKVRFKFFYLLEPGVPAGTCPKDYVEINGEKYCGERSQFVVTSNSNKITVRFHSDQSYTDTGFLAEYLSYDSSDPCPGQFTCRTGRCIRKELRCDGWADCTDHSDELNCSCDAGHQFTCKNKFCKPLFWVCDSVNDCGDNSDEQGCSCPAQTFRCSNGKCLSKSQQCNGKDDCGDGSDEASCPKVNVVTCTKHTYRCLNGLCLSKGNPECDGKEDCSDGSDEKDCDCGLRSFTRQARVVGGTDADEGEWPWQVSLHALGQGHICGASLISPNWLVSAAHCYIDDRGFRYSDPTQWTAFLGLHDQSQRSAPGVQERRLKRIISHPFFNDFTFDYDIALLELEKPAEYSSMVRPICLPDASHVFPAGKAIWVTGWGHTQEGGTGALILQKGEIRVINQTTCENLLPQQITPRMMCVGFLSGGVDSCQGDSGGPLSSVEADGRIFQAGVVSWGDGCAQRNTPGVYTRLPLFRDWIKENTGV

SEQ ID NO: 645 - protein, 855 aa, Homo sapiens
  Mutant MT-SP1 sequence; full length
  CB0423
MGSDRARKGGGGPKDFGAGLKYNSRHEKVNGLEEGVEFLPVNNVKKVEKHGPGRWVVLAAVLIGLLLVLLGIGFLVWHLQYRDVRVQKVFNGYMRITNENFVDAYENSNSTEFVSLASKVKDALKLLYSGVPFLGPYHKESAVTAFSEGSVIAYYWSEFSIPQHLVEEAERVMAEERVVMLPPRARSLKSFVVTSVVAFPTDSKTVQRTQDNSCSFGLHARGVELMRFTTPGFPDSPYPAHARCQWALRGDADSVLSLTFRSFDLASCDERGSDLVTVYNTLSPMEPHALVQLCGTYPPSYNLTFHSSQNVLLITLITNTERRHPGFEATFFQLPRMSSCGGRLRKAQGTFNSPYYPGHYPPNIDCTWNIEVPNNQHVKVRFKFFYLLEPGVPAGTCPKDYVEINGEKYCGERSQFVVTSNSNKITVRFHSDQSYTDTGFLAEYLSYDSSDPCPGQFTCRTGRCIRKELRCDGWADCTDHSDELNCSCDAGHQFTCKNKFCKPLFWVCDSVNDCGDNSDEQGCSCPAQTFRCSNGKCLSKSQQCNGKDDCGDGSDEASCPKVNVVTCTKHTYRCLNGLCLSKGNPECDGKEDCSDGSDEKDCDCGLRSFTRQARVVGGTDADEGEWPWQVSLHALGQGHTCGASLISPNWLVSAAHCYIDDRGFRYSDPTQWTAFLGLHDQSQRSAPGVQERRLKRIISHPFFNDFTFDYDIALLELEKPAEYSSMVRPICLPDASHVFPAGKAIWVTGWGHTQEGGTGALILQKGEIRVINQTTCENLLPQQITPRMMCVGFLSGGVDSCQGDSGGPLSSVEADGRIFQAGVVSWGDGCAQRNLPGVYTRLPLFRDWIKENTGV

SEQ ID NO: 646 - protein, 855 aa, Homo sapiens; identical to SEQ ID NO: 431
  Mutant MT-SP1 sequence; full length
  CB0016

SEQ ID NO: 647 - protein, 855 aa, Homo sapiens
  Mutant MT-SP1 sequence; full length
  CB0017
MGSDRARKGGGGPKDFGAGLKYNSRHEKVNGLEEGVEFLPVNNVKKVEKHGPGRWVVLAAVLIGLLLVLLGIGFLVWHLQYRDVRVQKVFNGYMRITNENFVDAYENSNSTEFVSLASKVKDALKLLYSGVPFLGPYHKESAVTAFSEGSVIAYYWSEFSIPQHLVEEAERVMAEERVVMLPPRARSLKSFVVTSVVAFPTDSKTVQRTQDNSCSFGLHARGVELMRFTTPGFPDSPYPAHARCQWALRGDADSVLSLTFRSFDLASCDERGSDLVTVYNTLSPMEPHALVQLCGTYPPSYNLTFHSSQNVLLITLITNTERRHPGFEATFFQLPRMSSCGGRLRKAQGTFNSPYYPGHYPPNIDCTWNIEVPNNQHVKVRFKFFYLLEPGVPAGTCPKDYVEINGEKYCGERSQFVVTSNSNKITVRFHSDQSYTDTGFLAEYLSYDSSDPCPGQFTCRTGRCIRKELRCDGWADCTDHSDELNCSCDAGHQFTCKNKFCKPLFWVCDSVNDCGDNSDEQGCSCPAQTFRCSNGKCLSKSQQCNGKDDCGDGSDEASCPKVNVVTCTKHTYRCLNGLCLSKGNPECDGKEDCSDGSDEKDCDCGLRSFTRQARVVGGTDADEGEWPWQVSLHALGQGHICGASLISPNWLVSAAHCYIDDRGFRYSDPTQWTAFLGLHDQSQRSAPGVQERRLKRIISHPFFNDFTFDYDIALLELEKPAEYSSMVRPICLPDASHVFPAGKAIWVTGWGHTQYGGTGALILQKGEIRVINQTTCENLNPQQITPRMMCVGFLSGGVDSCQGDSGGPLSSVEADGRIFQAGVVSWGDGCAQRNKPGVYTRLPLFRDWIKENTGV

SEQ ID NO: 648 - protein, 855 aa, Homo sapiens
  Mutant MT-SP1 sequence; full length
  CB0413
MGSDRARKGGGGPKDFGAGLKYNSRHEKVNGLEEGVEFLPVNNVKKVEKHGPGRWVVLAAVLIGLLLVLLGIGFLVWHLQYRDVRVQKVFNGYMRITNENFVDAYENSNSTEFVSLASKVKDALKLLYSGVPFLGPYHKESAVTAFSEGSVIAYYWSEFSIPQHLVEEAERVMAEERVVMLPPRARSLKSFVVTSVVAFPTDSKTVQRTQDNSCSFGLHARGVELMRFTTPGFPDSPYPAHARCQWALRGDADSVLSLTFRSFDLASCDERGSDLVTVYNTLSPMEPHALVQLCGTYPPSYNLTFHSSQNVLLITLITNTERRHPGFEATFFQLPRMSSCGGRLRKAQGTFNSPYYPGHYPPNIDCTWNIEVPNNQHVKVRFKFFYLLEPGVPAGTCPKDYVEINGEKYCGERSQFVVTSNSNKITVRFHSDQSYTDTGFLAEYLSYDSSDPCPGQFTCRTGRCIRKELRCDGWADCTDHSDELNCSCDAGHQFTCKNKFCKPLFWVCDSVNDCGDNSDEQGCSCPAQTFRCSNGKCLSKSQQCNGKDDCGDGSDEASCPKVNVVTCTKHTYRCLNGLCLSKGNPECDGKEDCSDGSDEKDCDCGLRSFTRQARVVGGTDADEGEWPWQVSLHALGQGHFCGASLISPNWLVSAAHCYIDDRGFRYSDPTQWTAFLGLHDQSQRSAPGVQERRLKRIISHPFFNDFTFDYDIALLELEKPAEYSSMVRPICLPDASHVFPAGKAIWVTGWGHTQDGGTGALILQKGEIRVINQTTCENLLPQQITPRMMCVGFLSGGVDSCQGDSGGPLSSVEADGRIFQAGVVSWGDGCAQRNFPGVYTRLPLFRDWIKENTGV

SEQ ID NO: 649 - protein, 855 aa, Homo sapiens
  Mutant MT-SP1 sequence; full length
  CB0412
MGSDRARKGGGGPKDFGAGLKYNSRHEKVNGLEEGVEFLPVNNVKKVEKHGPGRWVVLAAVLIGLLLVLLGIGFLVWHLQYRDVRVQKVFNGYMRITNENFVDAYENSNSTEFVSLASKVKDALKLLYSGVPFLGPYHKESAVTAFSEGSVIAYYWSEFSIPQHLVEEAERVMAEERVVMLPPRARSLKSFVVTSVVAFPTDSKTVQRTQDNSCSFGLHARGVELMRFTTPGFPDSPYPAHARCQWALRGDADSVLSLTFRSFDLASCDERGSDLVTVYNTLSPMEPHALVQLCGTYPPSYNLTFHSSQNVLLITLITNTERRHPGFEATFFQLPRMSSCGGRLRKAQGTFNSPYYPGHYPPNIDCTWNIEVPNNQHVKVRFKFFYLLEPGVPAGTCPKDYVEINGEKYCGERSQFVVTSNSNKITVRFHSDQSYTDTGFLAEYLSYDSSDPCPGQFTCRTGRCIRKELRCDGWADCTDHSDELNCSCDAGHQFTCKNKFCKPLFWVCDSVNDCGDNSDEQGCSCPAQTFRCSNGKCLSKSQQCNGKDDCGDGSDEASCPKVNVVTCTKHTYRCLNGLCLSKGNPECDGKEDCSDGSDEKDCDCGLRSFTRQARVVGGTDADEGEWPWQVSLHALGQGHLCGASLISPNWLVSAAHCYIDDRGFRYSDPTQWTAFLGLHDQSQRSAPGVQERRLKRIISHPFFNDFTFDYDIALLELEKPAEYSSMVRPICLPDASHVFPAGKAIWVTGWGHTQDGGTGALILQKGEIRVINQTTCENLLPQQITPRMMCVGFLSGGVDSCQGDSGGPLSSVEADGRIFQAGVVSWGDGCAQRNFPGVYTRLPLFRDWIKENTGV

SEQ ID NO: 650 - protein, 855 aa, Homo sapiens
  Mutant MT-SP1 sequence; full length
  CB0450
MGSDRARKGGGGPKDFGAGLKYNSRHEKVNGLEEGVEFLPVNNVKKVEKHGPGRWVVLAAVLIGLLLVLLGIGFLVWHLQYRDVRVQKVFNGYMRITNENFVDAYENSNSTEFVSLASKVKDALKLLYSGVPFLGPYHKESAVTAFSEGSVIAYYWSEFSIPQHLVEEAERVMAEERVVMLPPRARSLKSFVVTSVVAFPTDSKTVQRTQDNSCSFGLHARGVELMRFTTPGFPDSPYPAHARCQWALRGDADSVLSLTFRSFDLASCDERGSDLVTVYNTLSPMEPHALVQLCGTYPPSYNLTFHSSQNVLLITLITNTERRHPGFEATFFQLPRMSSCGGRLRKAQGTFNSPYYPGHYPPNIDCTWNIEVPNNQHVKVRFKFFYLLEPGVPAGTCPKDYVEINGEKYCGERSQFVVTSNSNKITVRFHSDQSYTDTGFLAEYLSYDSSDPCPGQFTCRTGRCIRKELRCDGWADCTDHSDELNCSCDAGHQFTCKNKFCKPLFWVCDSVNDCGDNSDEQGCSCPAQTFRCSNGKCLSKSQQCNGKDDCGDGSDEASCPKVNVVTCTKHTYRCLNGLCLSKGNPECDGKEDCSDGSDEKDCDCGLRSFTRQARVVGGTDADEGEWPWQVSLHALGQGHTCGASLISPNWLVSAAHCYIDDRGFRYSDPTQWTAFLGLHDQSQRSAPGVQERRLKRIISHPFFNDFTFDYDIALLELEKPAEYSSMVRPICLPDASHVFPAGKAIWVTGWGHTQDGGTLALILQKGEIRVINQTTCENLLPQQITPRMMCVGFLSGGVDSCQGDSGGPLSSVEADGRIFQAGVVSWGDGCAQRNFPGVYTRLPLFRDWIKENTGV

SEQ ID NO: 651 - protein, 855 aa, Homo sapiens
  Mutant MT-SP1 sequence; full length
  CB0409
MGSDRARKGGGGPKDFGAGLKYNSRHEKVNGLEEGVEFLPVNNVKKVEKHGPGRWVVLAAVLIGLLLVLLGIGFLVWHLQYRDVRVQKVFNGYMRITNENFVDAYENSNSTEFVSLASKVKDALKLLYSGVPFLGPYHKESAVTAFSEGSVIAYYWSEFSIPQHLVEEAERVMAEERVVMLPPRARSLKSFVVTSVVAFPTDSKTVQRTQDNSCSFGLHARGVELMRFTTPGFPDSPYPAHARCQWALRGDADSVLSLTFRSFDLASCDERGSDLVTVYNTLSPMEPHALVQLCGTYPPSYNLTFHSSQNVLLITLITNTERRHPGFEATFFQLPRMSSCGGRLRKAQGTFNSPYYPGHYPPNIDCTWNIEVPNNQHVKVRFKFFYLLEPGVPAGTCPKDYVEINGEKYCGERSQFVVTSNSNKITVRFHSDQSYTDTGFLAEYLSYDSSDPCPGQFTCRTGRCIRKELRCDGWADCTDHSDELNCSCDAGHQFTCKNKFCKPLFWVCDSVNDCGDNSDEQGCSCPAQTFRCSNGKCLSKSQQCNGKDDCGDGSDEASCPKVNVVTCTKHTYRCLNGLCLSKGNPECDGKEDCSDGSDEKDCDCGLRSFTRQARVVGGTDADEGEWPWQVSLHALGQGHACGASLISPNWLVSAAHCYIDDRGFRYSDPTQWTAFLGLHDQSQRSAPGVQERRLKRIISHPFFNDFTFDYDIALLELEKPAEYSSMVRPICLPDASHVFPAGKAIWVTGWGHTQDGGTGALILQKGEIRVINQTTCENLLPQQITPRMMCVGFLSGGVDSCQGDSGGPLSSVEADGRIFQAGVVSWGDGCAQRNFPGVYTRLPLFRDWIKENTGV

SEQ ID NO: 652 - protein, 855 aa, Homo sapiens
  Mutant MT-SP1 sequence; full length
  CB0350
MGSDRARKGGGGPKDFGAGLKYNSRHEKVNGLEEGVEFLPVNNVKKVEKHGPGRWVVLAAVLIGLLLVLLGIGFLVWHLQYRDVRVQKVFNGYMRITNENFVDAYENSNSTEFVSLASKVKDALKLLYSGVPFLGPYHKESAVTAFSEGSVIAYYWSEFSIPQHLVEEAERVMAEERVVMLPPRARSLKSFVVTSVVAFPTDSKTVQRTQDNSCSFGLHARGVELMRFTTPGFPDSPYPAHARCQWALRGDADSVLSLTFRSFDLASCDERGSDLVTVYNTLSPMEPHALVQLCGTYPPSYNLTFHSSQNVLLITLITNTERRHPGFEATFFQLPRMSSCGGRLRKAQGTFNSPYYPGHYPPNIDCTWNIEVPNNQHVKVRFKFFYLLEPGVPAGTCPKDYVEINGEKYCGERSQFVVTSNSNKITVRFHSDQSYTDTGFLAEYLSYDSSDPCPGQFTCRTGRCIRKELRCDGWADCTDHSDELNCSCDAGHQFTCKNKFCKPLFWVCDSVNDCGDNSDEQGCSCPAQTFRCSNGKCLSKSQQCNGKDDCGDGSDEASCPKVNVVTCTKHTYRCLNGLCLSKGNPECDGKEDCSDGSDEKDCDCGLRSFTRQARVVGGTDADEGEWPWQVSLHALGQGHECGASLISPNWLVSAAHCYIDDRGFRYSDPTQWTAFLGLHDQSQRSAPGVQERRLKRIISHPFFNDFTFDYDIALLELEKPAEYSSMVRPICLPDASHVFPAGKAIWVTGWGHTQDGGTGALILQKGEIRVINQTTCENLLPQQITPRMMCVGFLSGGVDSCQGDSGGPLSSVEADGRIFQAGVVSWGDGCAQRNFPGVYTRLPLFRDWIKENTGV

SEQ ID NO: 653 - protein, 855 aa, Homo sapiens
  Mutant MT-SP1 sequence; full length
  CB0331
MGSDRARKGGGGPKDFGAGLKYNSRHEKVNGLEEGVEFLPVNNVKKVEKHGPGRWVVLAAVLIGLLLVLLGIGFLVWHLQYRDVRVQKVFNGYMRITNENFVDAYENSNSTEFVSLASKVKDALKLLYSGVPFLGPYHKESAVTAFSEGSVIAYYWSEFSIPQHLVEEAERVMAEERVVMLPPRARSLKSFVVTSVVAFPTDSKTVQRTQDNSCSFGLHARGVELMRFTTPGFPDSPYPAHARCQWALRGDADSVLSLTFRSFDLASCDERGSDLVTVYNTLSPMEPHALVQLCGTYPPSYNLTFHSSQNVLLITLITNTERRHPGFEATFFQLPRMSSCGGRLRKAQGTFNSPYYPGHYPPNIDCTWNIEVPNNQHVKVRFKFFYLLEPGVPAGTCPKDYVEINGEKYCGERSQFVVTSNSNKITVRFHSDQSYTDTGFLAEYLSYDSSDPCPGQFTCRTGRCIRKELRCDGWADCTDHSDELNCSCDAGHQFTCKNKFCKPLFWVCDSVNDCGDNSDEQGCSCPAQTFRCSNGKCLSKSQQCNGKDDCGDGSDEASCPKVNVVTCTKHTYRCLNGLCLSKGNPECDGKEDCSDGSDEKDCDCGLRSFTRQARVVGGTDADEGEWPWQVSLHALGQGHDCGASLISPNWLVSAAHCYIDDRGFRYSDPTQWTAFLGLHDQSQRSAPGVQERRLKRIISHPFFNDFTFDYDIALLELEKPAEYSSMVRPICLPDASHVFPAGKAIWVTGWGHTQDGGTGALILQKGEIRVINQTTCENLLPQQITPRMMCVGFLSGGVDSCQGDSGGPLSSVEADGRIFQAGVVSWGDGCAQRNLPGVYTRLPLFRDWIKENTGV

SEQ ID NO: 654 - protein, 855 aa, Homo sapiens
  Mutant MT-SP1 sequence; full length
  CB0349
MGSDRARKGGGGPKDFGAGLKYNSRHEKVNGLEEGVEFLPVNNVKKVEKHGPGRWVVLAAVLIGLLLVLLGIGFLVWHLQYRDVRVQKVFNGYMRITNENFVDAYENSNSTEFVSLASKVKDALKLLYSGVPFLGPYHKESAVTAFSEGSVIAYYWSEFSIPQHLVEEAERVMAEERVVMLPPRARSLKSFVVTSVVAFPTDSKTVQRTQDNSCSFGLHARGVELMRFTTPGFPDSPYPAHARCQWALRGDADSVLSLTFRSFDLASCDERGSDLVTVYNTLSPMEPHALVQLCGTYPPSYNLTFHSSQNVLLITLITNTERRHPGFEATFFQLPRMSSCGGRLRKAQGTFNSPYYPGHYPPNIDCTWNIEVPNNQHVKVRFKFFYLLEPGVPAGTCPKDYVEINGEKYCGERSQFVVTSNSNKITVRFHSDQSYTDTGFLAEYLSYDSSDPCPGQFTCRTGRCIRKELRCDGWADCTDHSDELNCSCDAGHQFTCKNKFCKPLFWVCDSVNDCGDNSDEQGCSCPAQTFRCSNGKCLSKSQQCNGKDDCGDGSDEASCPKVNVVTCTKHTYRCLNGLCLSKGNPECDGKEDCSDGSDEKDCDCGLRSFTRQARVVGGTDADEGEWPWQVSLHALGQGHDCGASLISPNWLVSAAHCYIDDRGFRYSDPTQWTAFLGLHDQSQRSAPGVQERRLKRIISHPFFNDFTFDYDIALLELEKPAEYSSMVRPICLPDASHVFPAGKAIWVTGWGHTQDGGTGALILQKGEIRVINQTTCENLLPQQITPRMMCVGFLSGGVDSCQGDSGGPLSSVEADGRIFQAGVVSWGDGCAQRNFPGVYTRLPLFRDWIKENTGV

SEQ ID NO: 655 - protein, 855 aa, Homo sapiens
  Mutant MT-SP1 sequence; full length
  CB0212
MGSDRARKGGGGPKDFGAGLKYNSRHEKVNGLEEGVEFLPVNNVKKVEKHGPGRWVVLAAVLIGLLLVLLGIGFLVWHLQYRDVRVQKVFNGYMRITNENFVDAYENSNSTEFVSLASKVKDALKLLYSGVPFLGPYHKESAVTAFSEGSVIAYYWSEFSIPQHLVEEAERVMAEERVVMLPPRARSLKSFVVTSVVAFPTDSKTVQRTQDNSCSFGLHARGVELMRFTTPGFPDSPYPAHARCQWALRGDADSVLSLTFRSFDLASCDERGSDLVTVYNTLSPMEPHALVQLCGTYPPSYNLTFHSSQNVLLITLITNTERRHPGFEATFFQLPRMSSCGGRLRKAQGTFNSPYYPGHYPPNIDCTWNIEVPNNQHVKVRFKFFYLLEPGVPAGTCPKDYVEINGEKYCGERSQFVVTSNSNKITVRFHSDQSYTDTGFLAEYLSYDSSDPCPGQFTCRTGRCIRKELRCDGWADCTDHSDELNCSCDAGHQFTCKNKFCKPLFWVCDSVNDCGDNSDEQGCSCPAQTFRCSNGKCLSKSQQCNGKDDCGDGSDEASCPKVNVVTCTKHTYRCLNGLCLSKGNPECDGKEDCSDGSDEKDCDCGLRSFTRQARVVGGTDADEGEWPWQVSLHALGQGHICGASLISPNWLVSAAHCYIDDRGFRYSDPTQWTAFLGLHDQSQRSAPGVQERRLKRIISHPFFNDFTFDYDIALLELEKPAEYSSMVRPICLPDASHVFPAGKAIWVTGWGHTQNGGTGALILQKGEIRVINQTTCENLLPQQITPRMMCVGFLSGGVDSCQGDSGGPLSSVEADGRIFQAGVVSWGDGCAQRNFPGVYTRLPLFRDWIKENTGV

SEQ ID NO: 656 - protein, 855 aa, Homo sapiens
  Mutant MT-SP1 sequence; full length
  CB0421
MGSDRARKGGGGPKDFGAGLKYNSRHEKVNGLEEGVEFLPVNNVKKVEKHGPGRWVVLAAVLIGLLLVLLGIGFLVWHLQYRDVRVQKVFNGYMRITNENFVDAYENSNSTEFVSLASKVKDALKLLYSGVPFLGPYHKESAVTAFSEGSVIAYYWSEFSIPQHLVEEAERVMAEERVVMLPPRARSLKSFVVTSVVAFPTDSKTVQRTQDNSCSFGLHARGVELMRFTTPGFPDSPYPAHARCQWALRGDADSVLSLTFRSFDLASCDERGSDLVTVYNTLSPMEPHALVQLCGTYPPSYNLTFHSSQNVLLITLITNTERRHPGFEATFFQLPRMSSCGGRLRKAQGTFNSPYYPGHYPPNIDCTWNIEVPNNQHVKVRFKFFYLLEPGVPAGTCPKDYVEINGEKYCGERSQFVVTSNSNKITVRFHSDQSYTDTGFLAEYLSYDSSDPCPGQFTCRTGRCIRKELRCDGWADCTDHSDELNCSCDAGHQFTCKNKFCKPLFWVCDSVNDCGDNSDEQGCSCPAQTFRCSNGKCLSKSQQCNGKDDCGDGSDEASCPKVNVVTCTKHTYRCLNGLCLSKGNPECDGKEDCSDGSDEKDCDCGLRSFTRQARVVGGTDADEGEWPWQVSLHALGQGHTCGASLISPNWLVSAAHCYIDDRGFRYSDPTQWTAFLGLHDQSQRSAPGVQERRLKRIISHPFFNDFTFDYDIALLELEKPAEYSSMVRPICLPDASHVFPAGKAIWVTGWGHTQDGGTGALILQKGEIRVINQTTCENLLPQDITPRMMCVGFLSGGVDSCQGDSGGPLSSVEADGRIFQAGVVSWGDGCAQRNFPGVYTRLPLFRDWIKENTGV

SEQ ID NO: 657 - protein, 855 aa, Homo sapiens
  Mutant MT-SP1 sequence; full length
  CB0218
MGSDRARKGGGGPKDFGAGLKYNSRHEKVNGLEEGVEFLPVNNVKKVEKHGPGRWVVLAAVLIGLLLVLLGIGFLVWHLQYRDVRVQKVFNGYMRITNENFVDAYENSNSTEFVSLASKVKDALKLLYSGVPFLGPYHKESAVTAFSEGSVIAYYWSEFSIPQHLVEEAERVMAEERVVMLPPRARSLKSFVVTSVVAFPTDSKTVQRTQDNSCSFGLHARGVELMRFTTPGFPDSPYPAHARCQWALRGDADSVLSLTFRSFDLASCDERGSDLVTVYNTLSPMEPHALVQLCGTYPPSYNLTFHSSQNVLLITLITNTERRHPGFEATFFQLPRMSSCGGRLRKAQGTFNSPYYPGHYPPNIDCTWNIEVPNNQHVKVRFKFFYLLEPGVPAGTCPKDYVEINGEKYCGERSQFVVTSNSNKITVRFHSDQSYTDTGFLAEYLSYDSSDPCPGQFTCRTGRCIRKELRCDGWADCTDHSDELNCSCDAGHQFTCKNKFCKPLFWVCDSVNDCGDNSDEQGCSCPAQTFRCSNGKCLSKSQQCNGKDDCGDGSDEASCPKVNVVTCTKHTYRCLNGLCLSKGNPECDGKEDCSDGSDEKDCDCGLRSFTRQARVVGGTDADEGEWPWQVSLHALGQGHICGASLISPNWLVSAAHCYIDDRGFRYSDPTQWTAFLGLHDQSQRSAPGVQERRLKRIISHPFFNDFTFDYDIALLELEKPAEYSSMVRPICLPDASHVFPAGKAIWVTGWGHTQYGGTGALILQKGEIRVINQTTCENLLPQQITPRMMCVGFLSGGVDSCFGDSGGPLSSVEADGRIFQAGVVSWGDGCAQRNFPGVYTRLPLFRDWIKENTGV

SEQ ID NO: 658 - protein, 855 aa, Homo sapiens
  Mutant MT-SP1 sequence; full length
  CB0219
MGSDRARKGGGGPKDFGAGLKYNSRHEKVNGLEEGVEFLPVNNVKKVEKHGPGRWVVLAAVLIGLLLVLLGIGFLVWHLQYRDVRVQKVFNGYMRITNENFVDAYENSNSTEFVSLASKVKDALKLLYSGVPFLGPYHKESAVTAFSEGSVIAYYWSEFSIPQHLVEEAERVMAEERVVMLPPRARSLKSFVVTSVVAFPTDSKTVQRTQDNSCSFGLHARGVELMRFTTPGFPDSPYPAHARCQWALRGDADSVLSLTFRSFDLASCDERGSDLVTVYNTLSPMEPHALVQLCGTYPPSYNLTFHSSQNVLLITLITNTERRHPGFEATFFQLPRMSSCGGRLRKAQGTFNSPYYPGHYPPNIDCTWNIEVPNNQHVKVRFKFFYLLEPGVPAGTCPKDYVEINGEKYCGERSQFVVTSNSNKITVRFHSDQSYTDTGFLAEYLSYDSSDPCPGQFTCRTGRCIRKELRCDGWADCTDHSDELNCSCDAGHQFTCKNKFCKPLFWVCDSVNDCGDNSDEQGCSCPAQTFRCSNGKCLSKSQQCNGKDDCGDGSDEASCPKVNVVTCTKHTYRCLNGLCLSKGNPECDGKEDCSDGSDEKDCDCGLRSFTRQARVVGGTDADEGEWPWQVSLHALGQGHICGASLISPNWLVSAAHCYIDDRGFRYSDPTQWTAFLGLHDQSQRSAPGVQERRLKRIISHPFFNDFTFDYDIALLELEKPAEYSSMVRPICLPDASHVFPAGKAIWVTGWGHTQDGGTGALILQKGEIRVINQTTCENLLPQQITPRMMCVGFLSGGVDSCAGDSGGPLSSVEADGRIFQAGVVSWGDGCAQRNFPGVYTRLPLFRDWIKENTGV

SEQ ID NO: 659 - protein, 855 aa, Homo sapiens
  Mutant MT-SP1 sequence; full length
  CB0216
MGSDRARKGGGGPKDFGAGLKYNSRHEKVNGLEEGVEFLPVNNVKKVEKHGPGRWVVLAAVLIGLLLVLLGIGFLVWHLQYRDVRVQKVFNGYMRITNENFVDAYENSNSTEFVSLASKVKDALKLLYSGVPFLGPYHKESAVTAFSEGSVIAYYWSEFSIPQHLVEEAERVMAEERVVMLPPRARSLKSFVVTSVVAFPTDSKTVQRTQDNSCSFGLHARGVELMRFTTPGFPDSPYPAHARCQWALRGDADSVLSLTFRSFDLASCDERGSDLVTVYNTLSPMEPHALVQLCGTYPPSYNLTFHSSQNVLLITLITNTERRHPGFEATFFQLPRMSSCGGRLRKAQGTFNSPYYPGHYPPNIDCTWNIEVPNNQHVKVRFKFFYLLEPGVPAGTCPKDYVEINGEKYCGERSQFVVTSNSNKITVRFHSDQSYTDTGFLAEYLSYDSSDPCPGQFTCRTGRCIRKELRCDGWADCTDHSDELNCSCDAGHQFTCKNKFCKPLFWVCDSVNDCGDNSDEQGCSCPAQTFRCSNGKCLSKSQQCNGKDDCGDGSDEASCPKVNVVTCTKHTYRCLNGLCLSKGNPECDGKEDCSDGSDEKDCDCGLRSFTRQARVVGGTDADEGEWPWQVSLHALGQGHICGASLISPNWLVSAAHCYIDDRGFRYSDPTQWTAFLGLHDQSQRSAPGVQERRLKRIISHPFFNDFTFDYDIALLELEKPAEYSSMVRPICLPDASHVFPAGKAIWVTGWGHTQYGGTGALILQKGEIRVINQTTCENLLPQQITPRMMCVGFLSGGVDSCVGDSGGPLSSVEADGRIFQAGVVSWGDGCAQRNFPGVYTRLPLFRDWIKENTGV

SEQ ID NO: 660 - protein, 313 aa, Homo sapien
  Ficolin-2 (L- Ficolin)
MELDRAVGVLGAATLLLSFLGMAWALQAADTCPEVKMVGLEGSDKLTILRGCPGLPGAPGDKGEAGTNGKRGERGPPGPPGKAGPPGPNGAPGEPQPCLTGPRTCKDLLDRGHFLSGWHTIYLPDCRPLTVLCDMDTDGGGWTVFQRRVDGSVDFYRDWATYKQGFGSRLGEFWLGNDNIHALTAQGTSELRVDLVDFEDNYQFAKYRSFKVADEAEKYNLVLGAFVEGSAGDSLTFHNNQSFSTKDQDNDLNTGNCAVMFQGAWWYKNCHVSNLNGRYLRGTHGSFANGINWKSGKGYNYSYKVSEMKVRPA

SEQ ID NO: 661 - protein, 326 aa, Homo sapien
  Ficolin-1 (M-Ficolin)
MELSGATMARGLAVLLVLFLHIKNLPAQAADTCPEVKVVGLEGSDKLTILRGCPGLPGAPGPKGEAGVIGERGERGLPGAPGKAGPVGPKGDRGEKGMRGEKGDAGQSQSCATGPRNCKDLLDRGYFLSGWHTIYLPDCRPLTVLCDMDTDGGGWTVFQRRMDGSVDFYRDWAAYKQGFGSQLGEFWLGNDNIHALTAQGSSELRVDLVDFEGNHQFAKYKSFKVADEAEKYKLVLGAFVGGSAGNSLTGHNNNFFSTKDQDNDVSSSNCAEKFQGAWWYADCHASNLNGLYLMGPHESYANGINWSAAKGYKYSYKVSEMKVRPA

SEQ ID NO: 662 - protein, 299 aa, Homo sapien
  Ficolin-3 (H-ficolin/Hakata antigen)
MDLLWILPSLWLLLLGGPACLKTQEHPSCPGPRELEASKVVLLPSCPGAPGSPGEKGAPGPQGPPGPPGKMGPKGEPGDPVNLLRCQEGPRNCRELLSQGATLSGWYHLCLPEGRALPVFCDMDTEGGGWLVFQRRQDGSVDFFRSWSSYRAGFGNQESEFWLGNENLHQLTLQGNWELRVELEDFNGNRTFAHYATFRLLGEVDHYQLALGKFSEGTAGDSLSLHSGRPFTTYDADHDSSNSNCAVIVHGAWWYASCYRSNLNGRYAVSEAAAHKYGIDWASGRGVGHPYRRVRMMLR

SEQ ID NO: 663 - protein, 855 aa, Homo sapiens
  Mutant MT-SP1 sequence; full length
  CB0476
MGSDRARKGGGGPKDFGAGLKYNSRHEKVNGLEEGVEFLPVNNVKKVEKHGPGRWVVLAAVLIGLLLVLLGIGFLVWHLQYRDVRVQKVFNGYMRITNENFVDAYENSNSTEFVSLASKVKDALKLLYSGVPFLGPYHKESAVTAFSEGSVIAYYWSEFSIPQHLVEEAERVMAEERVVMLPPRARSLKSFVVTSVVAFPTDSKTVQRTQDNSCSFGLHARGVELMRFTTPGFPDSPYPAHARCQWALRGDADSVLSLTFRSFDLASCDERGSDLVTVYNTLSPMEPHALVQLCGTYPPSYNLTFHSSQNVLLITLITNTERRHPGFEATFFQLPRMSSCGGRLRKAQGTFNSPYYPGHYPPNIDCTWNIEVPNNQHVKVRFKFFYLLEPGVPAGTCPKDYVEINGEKYCGERSQFVVTSNSNKITVRFHSDQSYTDTGFLAEYLSYDSSDPCPGQFTCRTGRCIRKELRCDGWADCTDHSDELNCSCDAGHQFTCKNKFCKPLFWVCDSVNDCGDNSDEQGCSCPAQTFRCSNGKCLSKSQQCNGKDDCGDGSDEASCPKVNVVTCTKHTYRCLNGLCLSKGNPECDGKEDCSDGSDEKDCDCGLRSFTRQARVVGGTDADEGEWPWQVSLHALGQGHTCGASLISPNWLVSAAHCYIDDRGFRYSDPTQWTAFLGLHDQSQRSAPGVQERRLKRIISHPFFNDFTFDYDIALLELEKPAEYSSMVRPICLPDASHVFPAGKAIWVTGWGHTQDGGTGALILQKGEIRVINQTTCENLLPQDITPRMMCVGFLSGGVDSCQGDSGGPLSSVEADGRIFQAGVVSWGDGCAQRNLPGVYTRLPLFRDWIKENTGV

SEQ ID NO: 664 - protein, 855 aa, Homo sapiens
  Mutant MT-SP1 sequence; full length
  CB0477
MGSDRARKGGGGPKDFGAGLKYNSRHEKVNGLEEGVEFLPVNNVKKVEKHGPGRWVVLAAVLIGLLLVLLGIGFLVWHLQYRDVRVQKVFNGYMRITNENFVDAYENSNSTEFVSLASKVKDALKLLYSGVPFLGPYHKESAVTAFSEGSVIAYYWSEFSIPQHLVEEAERVMAEERVVMLPPRARSLKSFVVTSVVAFPTDSKTVQRTQDNSCSFGLHARGVELMRFTTPGFPDSPYPAHARCQWALRGDADSVLSLTFRSFDLASCDERGSDLVTVYNTLSPMEPHALVQLCGTYPPSYNLTFHSSQNVLLITLITNTERRHPGFEATFFQLPRMSSCGGRLRKAQGTFNSPYYPGHYPPNIDCTWNIEVPNNQHVKVRFKFFYLLEPGVPAGTCPKDYVEINGEKYCGERSQFVVTSNSNKITVRFHSDQSYTDTGFLAEYLSYDSSDPCPGQFTCRTGRCIRKELRCDGWADCTDHSDELNCSCDAGHQFTCKNKFCKPLFWVCDSVNDCGDNSDEQGCSCPAQTFRCSNGKCLSKSQQCNGKDDCGDGSDEASCPKVNVVTCTKHTYRCLNGLCLSKGNPECDGKEDCSDGSDEKDCDCGLRSFTRQARVVGGTDADEGEWPWQVSLHALGQGHTCGASLISPNWLVSAAHCYIDDRGFRYSDPTQWTAFLGLHDQSQRSAPGVQERRLKRIISHPFFNDFTFDYDIALLELEKPAEYSSMVRPICLPDASHVFPAGKAIWVTGWGHTQDGGTGALILQKGEIRVINQTTCENLLPQDITPRMMCVGFLSGGVDSCQGDSGGPLSSVEADGRIFQAGVVSWGDGCAQRNRPGVYTRLPLFRDWIKENTGV

SEQ ID NO: 665 - protein, 855 aa, Homo sapiens
  Mutant MT-SP1 sequence; full length
  CB0478
MGSDRARKGGGGPKDFGAGLKYNSRHEKVNGLEEGVEFLPVNNVKKVEKHGPGRWVVLAAVLIGLLLVLLGIGFLVWHLQYRDVRVQKVFNGYMRITNENFVDAYENSNSTEFVSLASKVKDALKLLYSGVPFLGPYHKESAVTAFSEGSVIAYYWSEFSIPQHLVEEAERVMAEERVVMLPPRARSLKSFVVTSVVAFPTDSKTVQRTQDNSCSFGLHARGVELMRFTTPGFPDSPYPAHARCQWALRGDADSVLSLTFRSFDLASCDERGSDLVTVYNTLSPMEPHALVQLCGTYPPSYNLTFHSSQNVLLITLITNTERRHPGFEATFFQLPRMSSCGGRLRKAQGTFNSPYYPGHYPPNIDCTWNIEVPNNQHVKVRFKFFYLLEPGVPAGTCPKDYVEINGEKYCGERSQFVVTSNSNKITVRFHSDQSYTDTGFLAEYLSYDSSDPCPGQFTCRTGRCIRKELRCDGWADCTDHSDELNCSCDAGHQFTCKNKFCKPLFWVCDSVNDCGDNSDEQGCSCPAQTFRCSNGKCLSKSQQCNGKDDCGDGSDEASCPKVNVVTCTKHTYRCLNGLCLSKGNPECDGKEDCSDGSDEKDCDCGLRSFTRQARVVGGTDADEGEWPWQVSLHALGQGHTCGASLISPNWLVSAAHCYIDDRGFRYSDPTQWTAFLGLHDQSQRSAPGVQERRLKRIISHPFFNDFTFDYDIALLELEKPAEYSSMVRPICLPDASHVFPAGKAIWVTGWGHTQDGGTGALILQKGEIRVINQTTCENLLPQDITPRMMCVGFLSGGVDSCQGDSGGPLSSVEADGRIFQAGVVSWGDGCAQRNNPGVYTRLPLFRDWIKENTGV

SEQ ID NO: 666 - protein, 855 aa, Homo sapiens
  Mutant MT-SP1 sequence; full length
  CB0480
MGSDRARKGGGGPKDFGAGLKYNSRHEKVNGLEEGVEFLPVNNVKKVEKHGPGRWVVLAAVLIGLLLVLLGIGFLVWHLQYRDVRVQKVFNGYMRITNENFVDAYENSNSTEFVSLASKVKDALKLLYSGVPFLGPYHKESAVTAFSEGSVIAYYWSEFSIPQHLVEEAERVMAEERVVMLPPRARSLKSFVVTSVVAFPTDSKTVQRTQDNSCSFGLHARGVELMRFTTPGFPDSPYPAHARCQWALRGDADSVLSLTFRSFDLASCDERGSDLVTVYNTLSPMEPHALVQLCGTYPPSYNLTFHSSQNVLLITLITNTERRHPGFEATFFQLPRMSSCGGRLRKAQGTFNSPYYPGHYPPNIDCTWNIEVPNNQHVKVRFKFFYLLEPGVPAGTCPKDYVEINGEKYCGERSQFVVTSNSNKITVRFHSDQSYTDTGFLAEYLSYDSSDPCPGQFTCRTGRCIRKELRCDGWADCTDHSDELNCSCDAGHQFTCKNKFCKPLFWVCDSVNDCGDNSDEQGCSCPAQTFRCSNGKCLSKSQQCNGKDDCGDGSDEASCPKVNVVTCTKHTYRCLNGLCLSKGNPECDGKEDCSDGSDEKDCDCGLRSFTRQARVVGGTDADEGEWPWQVSLHALGQGHTCGASLISPNWLVSAAHCYIDDRGFRYSDPTQWTAFLGLHDQSQRSAPGVQERRLKRIISHPFFNDFTFDYDIALLELEKPAEYSSMVRPICLPDASHVFPAGKAIWVTGWGHTQDGGTLALILQKGEIRVINQTTCENLLPQDITPRMMCVGFLSGGVDSCQGDSGGPLSSVEADGRIFQAGVVSWGDGCAQRNFPGVYTRLPLFRDWIKENTGV

SEQ ID NO: 667 - protein, 855 aa, Homo sapiens
  Mutant MT-SP1 sequence; full length
  CB0481
MGSDRARKGGGGPKDFGAGLKYNSRHEKVNGLEEGVEFLPVNNVKKVEKHGPGRWVVLAAVLIGLLLVLLGIGFLVWHLQYRDVRVQKVFNGYMRITNENFVDAYENSNSTEFVSLASKVKDALKLLYSGVPFLGPYHKESAVTAFSEGSVIAYYWSEFSIPQHLVEEAERVMAEERVVMLPPRARSLKSFVVTSVVAFPTDSKTVQRTQDNSCSFGLHARGVELMRFTTPGFPDSPYPAHARCQWALRGDADSVLSLTFRSFDLASCDERGSDLVTVYNTLSPMEPHALVQLCGTYPPSYNLTFHSSQNVLLITLITNTERRHPGFEATFFQLPRMSSCGGRLRKAQGTFNSPYYPGHYPPNIDCTWNIEVPNNQHVKVRFKFFYLLEPGVPAGTCPKDYVEINGEKYCGERSQFVVTSNSNKITVRFHSDQSYTDTGFLAEYLSYDSSDPCPGQFTCRTGRCIRKELRCDGWADCTDHSDELNCSCDAGHQFTCKNKFCKPLFWVCDSVNDCGDNSDEQGCSCPAQTFRCSNGKCLSKSQQCNGKDDCGDGSDEASCPKVNVVTCTKHTYRCLNGLCLSKGNPECDGKEDCSDGSDEKDCDCGLRSFTRQARVVGGTDADEGEWPWQVSLHALGQGHTCGASLISPNWLVSAAHCYIDDRGFRYSDPTQWTAFLGLHDQSQRSAPGVQERRLKRIISHPFFNDFTFDYDIALLELEKPAEYSSMVRPICLPDASHVFPAGKAIWVTGWGHTQDGGTLALILQKGEIRVINQTTCENLLPQDITPRMMCVGFLSGGVDSCQGDSGGPLSSVEADGRIFQAGVVSWGDGCAQRNLPGVYTRLPLFRDWIKENTGV

SEQ ID NO: 668 - protein, 855 aa, Homo sapiens
  Mutant MT-SP1 sequence; full length
  CB0482
MGSDRARKGGGGPKDFGAGLKYNSRHEKVNGLEEGVEFLPVNNVKKVEKHGPGRWVVLAAVLIGLLLVLLGIGFLVWHLQYRDVRVQKVFNGYMRITNENFVDAYENSNSTEFVSLASKVKDALKLLYSGVPFLGPYHKESAVTAFSEGSVIAYYWSEFSIPQHLVEEAERVMAEERVVMLPPRARSLKSFVVTSVVAFPTDSKTVQRTQDNSCSFGLHARGVELMRFTTPGFPDSPYPAHARCQWALRGDADSVLSLTFRSFDLASCDERGSDLVTVYNTLSPMEPHALVQLCGTYPPSYNLTFHSSQNVLLITLITNTERRHPGFEATFFQLPRMSSCGGRLRKAQGTFNSPYYPGHYPPNIDCTWNIEVPNNQHVKVRFKFFYLLEPGVPAGTCPKDYVEINGEKYCGERSQFVVTSNSNKITVRFHSDQSYTDTGFLAEYLSYDSSDPCPGQFTCRTGRCIRKELRCDGWADCTDHSDELNCSCDAGHQFTCKNKFCKPLFWVCDSVNDCGDNSDEQGCSCPAQTFRCSNGKCLSKSQQCNGKDDCGDGSDEASCPKVNVVTCTKHTYRCLNGLCLSKGNPECDGKEDCSDGSDEKDCDCGLRSFTRQARVVGGTDADEGEWPWQVSLHALGQGHTCGASLISPNWLVSAAHCYIDDRGFRYSDPTQWTAFLGLHDQSQRSAPGVQERRLKRIISHPFFNDFTFDYDIALLELEKPAEYSSMVRPICLPDASHVFPAGKAIWVTGWGHTQDGGTLALILQKGEIRVINQTTCENLLPQDITPRMMCVGFLSGGVDSCQGDSGGPLSSVEADGRIFQAGVVSWGDGCAQRNRPGVYTRLPLFRDWIKENTGV

SEQ ID NO: 669 - protein, 855 aa, Homo sapiens
  Mutant MT-SP1 sequence; full length
  CB0483
MGSDRARKGGGGPKDFGAGLKYNSRHEKVNGLEEGVEFLPVNNVKKVEKHGPGRWVVLAAVLIGLLLVLLGIGFLVWHLQYRDVRVQKVFNGYMRITNENFVDAYENSNSTEFVSLASKVKDALKLLYSGVPFLGPYHKESAVTAFSEGSVIAYYWSEFSIPQHLVEEAERVMAEERVVMLPPRARSLKSFVVTSVVAFPTDSKTVQRTQDNSCSFGLHARGVELMRFTTPGFPDSPYPAHARCQWALRGDADSVLSLTFRSFDLASCDERGSDLVTVYNTLSPMEPHALVQLCGTYPPSYNLTFHSSQNVLLITLITNTERRHPGFEATFFQLPRMSSCGGRLRKAQGTFNSPYYPGHYPPNIDCTWNIEVPNNQHVKVRFKFFYLLEPGVPAGTCPKDYVEINGEKYCGERSQFVVTSNSNKITVRFHSDQSYTDTGFLAEYLSYDSSDPCPGQFTCRTGRCIRKELRCDGWADCTDHSDELNCSCDAGHQFTCKNKFCKPLFWVCDSVNDCGDNSDEQGCSCPAQTFRCSNGKCLSKSQQCNGKDDCGDGSDEASCPKVNVVTCTKHTYRCLNGLCLSKGNPECDGKEDCSDGSDEKDCDCGLRSFTRQARVVGGTDADEGEWPWQVSLHALGQGHTCGASLISPNWLVSAAHCYIDDRGFRYSDPTQWTAFLGLHDQSQRSAPGVQERRLKRIISHPFFNDFTFDYDIALLELEKPAEYSSMVRPICLPDASHVFPAGKAIWVTGWGHTQDGGTLALILQKGEIRVINQTTCENLLPQDITPRMMCVGFLSGGVDSCQGDSGGPLSSVEADGRIFQAGVVSWGDGCAQRNNPGVYTRLPLFRDWIKENTGV

SEQ ID NO: 670 - protein, 855 aa, Homo sapiens
  Mutant MT-SP1 sequence; full length
  CB0484
MGSDRARKGGGGPKDFGAGLKYNSRHEKVNGLEEGVEFLPVNNVKKVEKHGPGRWVVLAAVLIGLLLVLLGIGFLVWHLQYRDVRVQKVFNGYMRITNENFVDAYENSNSTEFVSLASKVKDALKLLYSGVPFLGPYHKESAVTAFSEGSVIAYYWSEFSIPQHLVEEAERVMAEERVVMLPPRARSLKSFVVTSVVAFPTDSKTVQRTQDNSCSFGLHARGVELMRFTTPGFPDSPYPAHARCQWALRGDADSVLSLTFRSFDLASCDERGSDLVTVYNTLSPMEPHALVQLCGTYPPSYNLTFHSSQNVLLITLITNTERRHPGFEATFFQLPRMSSCGGRLRKAQGTFNSPYYPGHYPPNIDCTWNIEVPNNQHVKVRFKFFYLLEPGVPAGTCPKDYVEINGEKYCGERSQFVVTSNSNKITVRFHSDQSYTDTGFLAEYLSYDSSDPCPGQFTCRTGRCIRKELRCDGWADCTDHSDELNCSCDAGHQFTCKNKFCKPLFWVCDSVNDCGDNSDEQGCSCPAQTFRCSNGKCLSKSQQCNGKDDCGDGSDEASCPKVNVVTCTKHTYRCLNGLCLSKGNPECDGKEDCSDGSDEKDCDCGLRSFTRQARVVGGTDADEGEWPWQVSLHALGQGHTCGASLISPNWLVSAAHCYIDDRGFRYSDPTQWTAFLGLHDQSQRSAPGVQERRLKRIISHPFFNDFTFDYDIALLELEKPAEYSSMVRPICLPDASHVFPAGKAIWVTGWGHTQEGGTGALILQKGEIRVINQTTCENLLPQDITPRMMCVGFLSGGVDSCQGDSGGPLSSVEADGRIFQAGVVSWGDGCAQRNFPGVYTRLPLFRDWIKENTGV

SEQ ID NO: 671 - protein, 855 aa, Homo sapiens
  Mutant MT-SP1 sequence; full length
  CB0485
MGSDRARKGGGGPKDFGAGLKYNSRHEKVNGLEEGVEFLPVNNVKKVEKHGPGRWVVLAAVLIGLLLVLLGIGFLVWHLQYRDVRVQKVFNGYMRITNENFVDAYENSNSTEFVSLASKVKDALKLLYSGVPFLGPYHKESAVTAFSEGSVIAYYWSEFSIPQHLVEEAERVMAEERVVMLPPRARSLKSFVVTSVVAFPTDSKTVQRTQDNSCSFGLHARGVELMRFTTPGFPDSPYPAHARCQWALRGDADSVLSLTFRSFDLASCDERGSDLVTVYNTLSPMEPHALVQLCGTYPPSYNLTFHSSQNVLLITLITNTERRHPGFEATFFQLPRMSSCGGRLRKAQGTFNSPYYPGHYPPNIDCTWNIEVPNNQHVKVRFKFFYLLEPGVPAGTCPKDYVEINGEKYCGERSQFVVTSNSNKITVRFHSDQSYTDTGFLAEYLSYDSSDPCPGQFTCRTGRCIRKELRCDGWADCTDHSDELNCSCDAGHQFTCKNKFCKPLFWVCDSVNDCGDNSDEQGCSCPAQTFRCSNGKCLSKSQQCNGKDDCGDGSDEASCPKVNVVTCTKHTYRCLNGLCLSKGNPECDGKEDCSDGSDEKDCDCGLRSFTRQARVVGGTDADEGEWPWQVSLHALGQGHTCGASLISPNWLVSAAHCYIDDRGFRYSDPTQWTAFLGLHDQSQRSAPGVQERRLKRIISHPFFNDFTFDYDIALLELEKPAEYSSMVRPICLPDASHVFPAGKAIWVTGWGHTQEGGTGALILQKGEIRVINQTTCENLLPQDITPRMMCVGFLSGGVDSCQGDSGGPLSSVEADGRIFQAGVVSWGDGCAQRNLPGVYTRLPLFRDWIKENTGV

SEQ ID NO: 672 - protein, 241 aa, Homo sapiens
  Mutant MT-SP1 sequence; protease domain
  CB0476
VVGGTDADEGEWPWQVSLHALGQGHTCGASLISPNWLVSAAHCYIDDRGFRYSDPTQWTAFLGLHDQSQRSAPGVQERRLKRIISHPFFNDFTFDYDIALLELEKPAEYSSMVRPICLPDASHVFPAGKAIWVTGWGHTQDGGTGALILQKGEIRVINQTTCENLLPQDITPRMMCVGFLSGGVDSCQGDSGGPLSSVEADGRIFQAGVVSWGDGCAQRNLPGVYTRLPLFRDWIKENTGV

SEQ ID NO: 673 - protein, 241 aa, Homo sapiens
  Mutant MT-SP1 sequence; protease domain
  CB0477
VVGGTDADEGEWPWQVSLHALGQGHTCGASLISPNWLVSAAHCYIDDRGFRYSDPTQWTAFLGLHDQSQRSAPGVQERRLKRIISHPFFNDFTFDYDIALLELEKPAEYSSMVRPICLPDASHVFPAGKAIWVTGWGHTQDGGTGALILQKGEIRVINQTTCENLLPQDITPRMMCVGFLSGGVDSCQGDSGGPLSSVEADGRIFQAGVVSWGDGCAQRNRPGVYTRLPLFRDWIKENTGV

SEQ ID NO: 674 - protein, 241 aa, Homo sapiens
  Mutant MT-SP1 sequence; protease domain
  CB0478
VVGGTDADEGEWPWQVSLHALGQGHTCGASLISPNWLVSAAHCYIDDRGFRYSDPTQWTAFLGLHDQSQRSAPGVQERRLKRIISHPFFNDFTFDYDIALLELEKPAEYSSMVRPICLPDASHVFPAGKAIWVTGWGHTQDGGTGALILQKGEIRVINQTTCENLLPQDITPRMMCVGFLSGGVDSCQGDSGGPLSSVEADGRIFQAGVVSWGDGCAQRNNPGVYTRLPLFRDWIKENTGV

SEQ ID NO: 675 - protein, 241 aa, Homo sapiens
  Mutant MT-SP1 sequence; protease domain
  CB0480
VVGGTDADEGEWPWQVSLHALGQGHTCGASLISPNWLVSAAHCYIDDRGFRYSDPTQWTAFLGLHDQSQRSAPGVQERRLKRIISHPFFNDFTFDYDIALLELEKPAEYSSMVRPICLPDASHVFPAGKAIWVTGWGHTQDGGTLALILQKGEIRVINQTTCENLLPQDITPRMMCVGFLSGGVDSCQGDSGGPLSSVEADGRIFQAGVVSWGDGCAQRNFPGVYTRLPLFRDWIKENTGV

SEQ ID NO: 676 - protein, 241 aa, Homo sapiens
  Mutant MT-SP1 sequence; protease domain
  CB0481
VVGGTDADEGEWPWQVSLHALGQGHTCGASLISPNWLVSAAHCYIDDRGFRYSDPTQWTAFLGLHDQSQRSAPGVQERRLKRIISHPFFNDFTFDYDIALLELEKPAEYSSMVRPICLPDASHVFPAGKAIWVTGWGHTQDGGTLALILQKGEIRVINQTTCENLLPQDITPRMMCVGFLSGGVDSCQGDSGGPLSSVEADGRIFQAGVVSWGDGCAQRNLPGVYTRLPLFRDWIKENTGV

SEQ ID NO: 677 - protein, 241 aa, Homo sapiens
  Mutant MT-SP1 sequence; protease domain
  CB0482
VVGGTDADEGEWPWQVSLHALGQGHTCGASLISPNWLVSAAHCYIDDRGFRYSDPTQWTAFLGLHDQSQRSAPGVQERRLKRIISHPFFNDFTFDYDIALLELEKPAEYSSMVRPICLPDASHVFPAGKAIWVTGWGHTQDGGTLALILQKGEIRVINQTTCENLLPQDITPRMMCVGFLSGGVDSCQGDSGGPLSSVEADGRIFQAGVVSWGDGCAQRNRPGVYTRLPLFRDWIKENTGV

SEQ ID NO: 678 - protein, 241 aa, Homo sapiens
  Mutant MT-SP1 sequence; protease domain
  CB0483
VVGGTDADEGEWPWQVSLHALGQGHTCGASLISPNWLVSAAHCYIDDRGFRYSDPTQWTAFLGLHDQSQRSAPGVQERRLKRIISHPFFNDFTFDYDIALLELEKPAEYSSMVRPICLPDASHVFPAGKAIWVTGWGHTQDGGTLALILQKGEIRVINQTTCENLLPQDITPRMMCVGFLSGGVDSCQGDSGGPLSSVEADGRIFQAGVVSWGDGCAQRNNPGVYTRLPLFRDWIKENTGV

SEQ ID NO: 679 - protein, 241 aa, Homo sapiens
  Mutant MT-SP1 sequence; protease domain
  CB0484
VVGGTDADEGEWPWQVSLHALGQGHTCGASLISPNWLVSAAHCYIDDRGFRYSDPTQWTAFLGLHDQSQRSAPGVQERRLKRIISHPFFNDFTFDYDIALLELEKPAEYSSMVRPICLPDASHVFPAGKAIWVTGWGHTQEGGTGALILQKGEIRVINQTTCENLLPQDITPRMMCVGFLSGGVDSCQGDSGGPLSSVEADGRIFQAGVVSWGDGCAQRNFPGVYTRLPLFRDWIKENTGV

SEQ ID NO: 680 - protein, 241 aa, Homo sapiens
  Mutant MT-SP1 sequence; protease domain
  CB0485
VVGGTDADEGEWPWQVSLHALGQGHTCGASLISPNWLVSAAHCYIDDRGFRYSDPTQWTAFLGLHDQSQRSAPGVQERRLKRIISHPFFNDFTFDYDIALLELEKPAEYSSMVRPICLPDASHVFPAGKAIWVTGWGHTQEGGTGALILQKGEIRVINQTTCENLLPQDITPRMMCVGFLSGGVDSCQGDSGGPLSSVEADGRIFQAGVVSWGDGCAQRNLPGVYTRLPLFRDWIKENTGV

SEQ ID NO: 681 - protein, 855 aa, Homo sapiens
  Mutant MT-SP1 sequence; full length
  I41T/Y146D/G151L/K224N
MGSDRARKGGGGPKDFGAGLKYNSRHEKVNGLEEGVEFLPVNNVKKVEKHGPGRWVVLAAVLIGLLLVLLGIGFLVWHLQYRDVRVQKVFNGYMRITNENFVDAYENSNSTEFVSLASKVKDALKLLYSGVPFLGPYHKESAVTAFSEGSVIAYYWSEFSIPQHLVEEAERVMAEERVVMLPPRARSLKSFVVTSVVAFPTDSKTVQRTQDNSCSFGLHARGVELMRFTTPGFPDSPYPAHARCQWALRGDADSVLSLTFRSFDLASCDERGSDLVTVYNTLSPMEPHALVQLCGTYPPSYNLTFHSSQNVLLITLITNTERRHPGFEATFFQLPRMSSCGGRLRKAQGTFNSPYYPGHYPPNIDCTWNIEVPNNQHVKVRFKFFYLLEPGVPAGTCPKDYVEINGEKYCGERSQFVVTSNSNKITVRFHSDQSYTDTGFLAEYLSYDSSDPCPGQFTCRTGRCIRKELRCDGWADCTDHSDELNCSCDAGHQFTCKNKFCKPLFWVCDSVNDCGDNSDEQGCSCPAQTFRCSNGKCLSKSQQCNGKDDCGDGSDEASCPKVNVVTCTKHTYRCLNGLCLSKGNPECDGKEDCSDGSDEKDCDCGLRSFTRQARVVGGTDADEGEWPWQVSLHALGQGHTCGASLISPNWLVSAAHCYIDDRGFRYSDPTQWTAFLGLHDQSQRSAPGVQERRLKRIISHPFFNDFTFDYDIALLELEKPAEYSSMVRPICLPDASHVFPAGKAIWVTGWGHTQDGGTLALILQKGEIRVINQTTCENLLPQQITPRMMCVGFLSGGVDSCQGDSGGPLSSVEADGRIFQAGVVSWGDGCAQRNNPGVYTRLPLFRDWIKENTGV

SEQ ID NO: 682 - protein, 855 aa, Homo sapiens
  Mutant MT-SP1 sequence; full length
  Y146D/Q175D/K224N
MGSDRARKGGGGPKDFGAGLKYNSRHEKVNGLEEGVEFLPVNNVKKVEKHGPGRWVVLAAVLIGLLLVLLGIGFLVWHLQYRDVRVQKVFNGYMRITNENFVDAYENSNSTEFVSLASKVKDALKLLYSGVPFLGPYHKESAVTAFSEGSVIAYYWSEFSIPQHLVEEAERVMAEERVVMLPPRARSLKSFVVTSVVAFPTDSKTVQRTQDNSCSFGLHARGVELMRFTTPGFPDSPYPAHARCQWALRGDADSVLSLTFRSFDLASCDERGSDLVTVYNTLSPMEPHALVQLCGTYPPSYNLTFHSSQNVLLITLITNTERRHPGFEATFFQLPRMSSCGGRLRKAQGTFNSPYYPGHYPPNIDCTWNIEVPNNQHVKVRFKFFYLLEPGVPAGTCPKDYVEINGEKYCGERSQFVVTSNSNKITVRFHSDQSYTDTGFLAEYLSYDSSDPCPGQFTCRTGRCIRKELRCDGWADCTDHSDELNCSCDAGHQFTCKNKFCKPLFWVCDSVNDCGDNSDEQGCSCPAQTFRCSNGKCLSKSQQCNGKDDCGDGSDEASCPKVNVVTCTKHTYRCLNGLCLSKGNPECDGKEDCSDGSDEKDCDCGLRSFTRQARVVGGTDADEGEWPWQVSLHALGQGHICGASLISPNWLVSAAHCYIDDRGFRYSDPTQWTAFLGLHDQSQRSAPGVQERRLKRIISHPFFNDFTFDYDIALLELEKPAEYSSMVRPICLPDASHVFPAGKAIWVTGWGHTQDGGTGALILQKGEIRVINQTTCENLLPQDITPRMMCVGFLSGGVDSCQGDSGGPLSSVEADGRIFQAGVVSWGDGCAQRNNPGVYTRLPLFRDWIKENTGV

SEQ ID NO: 683 - protein, 855 aa, Homo sapiens
  Mutant MT-SP1 sequence; full length
  I41T/Y146D/K224N
MGSDRARKGGGGPKDFGAGLKYNSRHEKVNGLEEGVEFLPVNNVKKVEKHGPGRWVVLAAVLIGLLLVLLGIGFLVWHLQYRDVRVQKVFNGYMRITNENFVDAYENSNSTEFVSLASKVKDALKLLYSGVPFLGPYHKESAVTAFSEGSVIAYYWSEFSIPQHLVEEAERVMAEERVVMLPPRARSLKSFVVTSVVAFPTDSKTVQRTQDNSCSFGLHARGVELMRFTTPGFPDSPYPAHARCQWALRGDADSVLSLTFRSFDLASCDERGSDLVTVYNTLSPMEPHALVQLCGTYPPSYNLTFHSSQNVLLITLITNTERRHPGFEATFFQLPRMSSCGGRLRKAQGTFNSPYYPGHYPPNIDCTWNIEVPNNQHVKVRFKFFYLLEPGVPAGTCPKDYVEINGEKYCGERSQFVVTSNSNKITVRFHSDQSYTDTGFLAEYLSYDSSDPCPGQFTCRTGRCIRKELRCDGWADCTDHSDELNCSCDAGHQFTCKNKFCKPLFWVCDSVNDCGDNSDEQGCSCPAQTFRCSNGKCLSKSQQCNGKDDCGDGSDEASCPKVNVVTCTKHTYRCLNGLCLSKGNPECDGKEDCSDGSDEKDCDCGLRSFTRQARVVGGTDADEGEWPWQVSLHALGQGHTCGASLISPNWLVSAAHCYIDDRGFRYSDPTQWTAFLGLHDQSQRSAPGVQERRLKRIISHPFFNDFTFDYDIALLELEKPAEYSSMVRPICLPDASHVFPAGKAIWVTGWGHTQDGGTGALILQKGEIRVINQTTCENLLPQQITPRMMCVGFLSGGVDSCQGDSGGPLSSVEADGRIFQAGVVSWGDGCAQRNNPGVYTRLPLFRDWIKENTGV

SEQ ID NO: 684 - protein, 855 aa, Homo sapiens
  Mutant MT-SP1 sequence; full length
  Y146D/G151L/K224N
MGSDRARKGGGGPKDFGAGLKYNSRHEKVNGLEEGVEFLPVNNVKKVEKHGPGRWVVLAAVLIGLLLVLLGIGFLVWHLQYRDVRVQKVFNGYMRITNENFVDAYENSNSTEFVSLASKVKDALKLLYSGVPFLGPYHKESAVTAFSEGSVIAYYWSEFSIPQHLVEEAERVMAEERVVMLPPRARSLKSFVVTSVVAFPTDSKTVQRTQDNSCSFGLHARGVELMRFTTPGFPDSPYPAHARCQWALRGDADSVLSLTFRSFDLASCDERGSDLVTVYNTLSPMEPHALVQLCGTYPPSYNLTFHSSQNVLLITLITNTERRHPGFEATFFQLPRMSSCGGRLRKAQGTFNSPYYPGHYPPNIDCTWNIEVPNNQHVKVRFKFFYLLEPGVPAGTCPKDYVEINGEKYCGERSQFVVTSNSNKITVRFHSDQSYTDTGFLAEYLSYDSSDPCPGQFTCRTGRCIRKELRCDGWADCTDHSDELNCSCDAGHQFTCKNKFCKPLFWVCDSVNDCGDNSDEQGCSCPAQTFRCSNGKCLSKSQQCNGKDDCGDGSDEASCPKVNVVTCTKHTYRCLNGLCLSKGNPECDGKEDCSDGSDEKDCDCGLRSFTRQARVVGGTDADEGEWPWQVSLHALGQGHICGASLISPNWLVSAAHCYIDDRGFRYSDPTQWTAFLGLHDQSQRSAPGVQERRLKRIISHPFFNDFTFDYDIALLELEKPAEYSSMVRPICLPDASHVFPAGKAIWVTGWGHTQDGGTLALILQKGEIRVINQTTCENLLPQQITPRMMCVGFLSGGVDSCQGDSGGPLSSVEADGRIFQAGVVSWGDGCAQRNNPGVYTRLPLFRDWIKENTGV

SEQ ID NO: 685 - protein, 855 aa, Homo sapiens
  Mutant MT-SP1 sequence; full length
  Y146D/Q175R/K224N
MGSDRARKGGGGPKDFGAGLKYNSRHEKVNGLEEGVEFLPVNNVKKVEKHGPGRWVVLAAVLIGLLLVLLGIGFLVWHLQYRDVRVQKVFNGYMRITNENFVDAYENSNSTEFVSLASKVKDALKLLYSGVPFLGPYHKESAVTAFSEGSVIAYYWSEFSIPQHLVEEAERVMAEERVVMLPPRARSLKSFVVTSVVAFPTDSKTVQRTQDNSCSFGLHARGVELMRFTTPGFPDSPYPAHARCQWALRGDADSVLSLTFRSFDLASCDERGSDLVTVYNTLSPMEPHALVQLCGTYPPSYNLTFHSSQNVLLITLITNTERRHPGFEATFFQLPRMSSCGGRLRKAQGTFNSPYYPGHYPPNIDCTWNIEVPNNQHVKVRFKFFYLLEPGVPAGTCPKDYVEINGEKYCGERSQFVVTSNSNKITVRFHSDQSYTDTGFLAEYLSYDSSDPCPGQFTCRTGRCIRKELRCDGWADCTDHSDELNCSCDAGHQFTCKNKFCKPLFWVCDSVNDCGDNSDEQGCSCPAQTFRCSNGKCLSKSQQCNGKDDCGDGSDEASCPKVNVVTCTKHTYRCLNGLCLSKGNPECDGKEDCSDGSDEKDCDCGLRSFTRQARVVGGTDADEGEWPWQVSLHALGQGHICGASLISPNWLVSAAHCYIDDRGFRYSDPTQWTAFLGLHDQSQRSAPGVQERRLKRIISHPFFNDFTFDYDIALLELEKPAEYSSMVRPICLPDASHVFPAGKAIWVTGWGHTQDGGTGALILQKGEIRVINQTTCENLLPQRITPRMMCVGFLSGGVDSCQGDSGGPLSSVEADGRIFQAGVVSWGDGCAQRNNPGVYTRLPLFRDWIKENTGV

SEQ ID NO: 686 - protein, 855 aa, Homo sapiens
  Mutant MT-SP1 sequence; full length
  Y146D/Q175K/K224N
MGSDRARKGGGGPKDFGAGLKYNSRHEKVNGLEEGVEFLPVNNVKKVEKHGPGRWVVLAAVLIGLLLVLLGIGFLVWHLQYRDVRVQKVFNGYMRITNENFVDAYENSNSTEFVSLASKVKDALKLLYSGVPFLGPYHKESAVTAFSEGSVIAYYWSEFSIPQHLVEEAERVMAEERVVMLPPRARSLKSFVVTSVVAFPTDSKTVQRTQDNSCSFGLHARGVELMRFTTPGFPDSPYPAHARCQWALRGDADSVLSLTFRSFDLASCDERGSDLVTVYNTLSPMEPHALVQLCGTYPPSYNLTFHSSQNVLLITLITNTERRHPGFEATFFQLPRMSSCGGRLRKAQGTFNSPYYPGHYPPNIDCTWNIEVPNNQHVKVRFKFFYLLEPGVPAGTCPKDYVEINGEKYCGERSQFVVTSNSNKITVRFHSDQSYTDTGFLAEYLSYDSSDPCPGQFTCRTGRCIRKELRCDGWADCTDHSDELNCSCDAGHQFTCKNKFCKPLFWVCDSVNDCGDNSDEQGCSCPAQTFRCSNGKCLSKSQQCNGKDDCGDGSDEASCPKVNVVTCTKHTYRCLNGLCLSKGNPECDGKEDCSDGSDEKDCDCGLRSFTRQARVVGGTDADEGEWPWQVSLHALGQGHICGASLISPNWLVSAAHCYIDDRGFRYSDPTQWTAFLGLHDQSQRSAPGVQERRLKRIISHPFFNDFTFDYDIALLELEKPAEYSSMVRPICLPDASHVFPAGKAIWVTGWGHTQDGGTGALILQKGEIRVINQTTCENLLPQKITPRMMCVGFLSGGVDSCQGDSGGPLSSVEADGRIFQAGVVSWGDGCAQRNNPGVYTRLPLFRDWIKENTGV

SEQ ID NO: 687 - protein, 855 aa, Homo sapiens
  Mutant MT-SP1 sequence; full length
  Y146D/Q175H/K224N
MGSDRARKGGGGPKDFGAGLKYNSRHEKVNGLEEGVEFLPVNNVKKVEKHGPGRWVVLAAVLIGLLLVLLGIGFLVWHLQYRDVRVQKVFNGYMRITNENFVDAYENSNSTEFVSLASKVKDALKLLYSGVPFLGPYHKESAVTAFSEGSVIAYYWSEFSIPQHLVEEAERVMAEERVVMLPPRARSLKSFVVTSVVAFPTDSKTVQRTQDNSCSFGLHARGVELMRFTTPGFPDSPYPAHARCQWALRGDADSVLSLTFRSFDLASCDERGSDLVTVYNTLSPMEPHALVQLCGTYPPSYNLTFHSSQNVLLITLITNTERRHPGFEATFFQLPRMSSCGGRLRKAQGTFNSPYYPGHYPPNIDCTWNIEVPNNQHVKVRFKFFYLLEPGVPAGTCPKDYVEINGEKYCGERSQFVVTSNSNKITVRFHSDQSYTDTGFLAEYLSYDSSDPCPGQFTCRTGRCIRKELRCDGWADCTDHSDELNCSCDAGHQFTCKNKFCKPLFWVCDSVNDCGDNSDEQGCSCPAQTFRCSNGKCLSKSQQCNGKDDCGDGSDEASCPKVNVVTCTKHTYRCLNGLCLSKGNPECDGKEDCSDGSDEKDCDCGLRSFTRQARVVGGTDADEGEWPWQVSLHALGQGHICGASLISPNWLVSAAHCYIDDRGFRYSDPTQWTAFLGLHDQSQRSAPGVQERRLKRIISHPFFNDFTFDYDIALLELEKPAEYSSMVRPICLPDASHVFPAGKAIWVTGWGHTQDGGTGALILQKGEIRVINQTTCENLLPQHITPRMMCVGFLSGGVDSCQGDSGGPLSSVEADGRIFQAGVVSWGDGCAQRNNPGVYTRLPLFRDWIKENTGV

SEQ ID NO: 688 - protein, 855 aa, Homo sapiens
  Mutant MT-SP1 sequence; full length
  I41T/Y146D/G151L/Q175K/K224F
MGSDRARKGGGGPKDFGAGLKYNSRHEKVNGLEEGVEFLPVNNVKKVEKHGPGRWVVLAAVLIGLLLVLLGIGFLVWHLQYRDVRVQKVFNGYMRITNENFVDAYENSNSTEFVSLASKVKDALKLLYSGVPFLGPYHKESAVTAFSEGSVIAYYWSEFSIPQHLVEEAERVMAEERVVMLPPRARSLKSFVVTSVVAFPTDSKTVQRTQDNSCSFGLHARGVELMRFTTPGFPDSPYPAHARCQWALRGDADSVLSLTFRSFDLASCDERGSDLVTVYNTLSPMEPHALVQLCGTYPPSYNLTFHSSQNVLLITLITNTERRHPGFEATFFQLPRMSSCGGRLRKAQGTFNSPYYPGHYPPNIDCTWNIEVPNNQHVKVRFKFFYLLEPGVPAGTCPKDYVEINGEKYCGERSQFVVTSNSNKITVRFHSDQSYTDTGFLAEYLSYDSSDPCPGQFTCRTGRCIRKELRCDGWADCTDHSDELNCSCDAGHQFTCKNKFCKPLFWVCDSVNDCGDNSDEQGCSCPAQTFRCSNGKCLSKSQQCNGKDDCGDGSDEASCPKVNVVTCTKHTYRCLNGLCLSKGNPECDGKEDCSDGSDEKDCDCGLRSFTRQARVVGGTDADEGEWPWQVSLHALGQGHTCGASLISPNWLVSAAHCYIDDRGFRYSDPTQWTAFLGLHDQSQRSAPGVQERRLKRIISHPFFNDFTFDYDIALLELEKPAEYSSMVRPICLPDASHVFPAGKAIWVTGWGHTQDGGTLALILQKGEIRVINQTTCENLLPQKITPRMMCVGFLSGGVDSCQGDSGGPLSSVEADGRIFQAGVVSWGDGCAQRNFPGVYTRLPLFRDWIKENTGV

SEQ ID NO: 689 - protein, 855 aa, Homo sapiens
  Mutant MT-SP1 sequence; full length
  I41T/Y146D/G151L/Q175R/K224F
MGSDRARKGGGGPKDFGAGLKYNSRHEKVNGLEEGVEFLPVNNVKKVEKHGPGRWVVLAAVLIGLLLVLLGIGFLVWHLQYRDVRVQKVFNGYMRITNENFVDAYENSNSTEFVSLASKVKDALKLLYSGVPFLGPYHKESAVTAFSEGSVIAYYWSEFSIPQHLVEEAERVMAEERVVMLPPRARSLKSFVVTSVVAFPTDSKTVQRTQDNSCSFGLHARGVELMRFTTPGFPDSPYPAHARCQWALRGDADSVLSLTFRSFDLASCDERGSDLVTVYNTLSPMEPHALVQLCGTYPPSYNLTFHSSQNVLLITLITNTERRHPGFEATFFQLPRMSSCGGRLRKAQGTFNSPYYPGHYPPNIDCTWNIEVPNNQHVKVRFKFFYLLEPGVPAGTCPKDYVEINGEKYCGERSQFVVTSNSNKITVRFHSDQSYTDTGFLAEYLSYDSSDPCPGQFTCRTGRCIRKELRCDGWADCTDHSDELNCSCDAGHQFTCKNKFCKPLFWVCDSVNDCGDNSDEQGCSCPAQTFRCSNGKCLSKSQQCNGKDDCGDGSDEASCPKVNVVTCTKHTYRCLNGLCLSKGNPECDGKEDCSDGSDEKDCDCGLRSFTRQARVVGGTDADEGEWPWQVSLHALGQGHTCGASLISPNWLVSAAHCYIDDRGFRYSDPTQWTAFLGLHDQSQRSAPGVQERRLKRIISHPFFNDFTFDYDIALLELEKPAEYSSMVRPICLPDASHVFPAGKAIWVTGWGHTQDGGTLALILQKGEIRVINQTTCENLLPQRITPRMMCVGFLSGGVDSCQGDSGGPLSSVEADGRIFQAGVVSWGDGCAQRNFPGVYTRLPLFRDWIKENTGV

SEQ ID NO: 690 - protein, 855 aa, Homo sapiens
  Mutant MT-SP1 sequence; full length
  I41T/Y146D/G151L/Q175H/K224F
MGSDRARKGGGGPKDFGAGLKYNSRHEKVNGLEEGVEFLPVNNVKKVEKHGPGRWVVLAAVLIGLLLVLLGIGFLVWHLQYRDVRVQKVFNGYMRITNENFVDAYENSNSTEFVSLASKVKDALKLLYSGVPFLGPYHKESAVTAFSEGSVIAYYWSEFSIPQHLVEEAERVMAEERVVMLPPRARSLKSFVVTSVVAFPTDSKTVQRTQDNSCSFGLHARGVELMRFTTPGFPDSPYPAHARCQWALRGDADSVLSLTFRSFDLASCDERGSDLVTVYNTLSPMEPHALVQLCGTYPPSYNLTFHSSQNVLLITLITNTERRHPGFEATFFQLPRMSSCGGRLRKAQGTFNSPYYPGHYPPNIDCTWNIEVPNNQHVKVRFKFFYLLEPGVPAGTCPKDYVEINGEKYCGERSQFVVTSNSNKITVRFHSDQSYTDTGFLAEYLSYDSSDPCPGQFTCRTGRCIRKELRCDGWADCTDHSDELNCSCDAGHQFTCKNKFCKPLFWVCDSVNDCGDNSDEQGCSCPAQTFRCSNGKCLSKSQQCNGKDDCGDGSDEASCPKVNVVTCTKHTYRCLNGLCLSKGNPECDGKEDCSDGSDEKDCDCGLRSFTRQARVVGGTDADEGEWPWQVSLHALGQGHTCGASLISPNWLVSAAHCYIDDRGFRYSDPTQWTAFLGLHDQSQRSAPGVQERRLKRIISHPFFNDFTFDYDIALLELEKPAEYSSMVRPICLPDASHVFPAGKAIWVTGWGHTQDGGTLALILQKGEIRVINQTTCENLLPQHITPRMMCVGFLSGGVDSCQGDSGGPLSSVEADGRIFQAGVVSWGDGCAQRNFPGVYTRLPLFRDWIKENTGV

SEQ ID NO: 691 - protein, 855 aa, Homo sapiens
  Mutant MT-SP1 sequence; full length
  I41T/Y146D/G151L/Q175Y/K224F
MGSDRARKGGGGPKDFGAGLKYNSRHEKVNGLEEGVEFLPVNNVKKVEKHGPGRWVVLAAVLIGLLLVLLGIGFLVWHLQYRDVRVQKVFNGYMRITNENFVDAYENSNSTEFVSLASKVKDALKLLYSGVPFLGPYHKESAVTAFSEGSVIAYYWSEFSIPQHLVEEAERVMAEERVVMLPPRARSLKSFVVTSVVAFPTDSKTVQRTQDNSCSFGLHARGVELMRFTTPGFPDSPYPAHARCQWALRGDADSVLSLTFRSFDLASCDERGSDLVTVYNTLSPMEPHALVQLCGTYPPSYNLTFHSSQNVLLITLITNTERRHPGFEATFFQLPRMSSCGGRLRKAQGTFNSPYYPGHYPPNIDCTWNIEVPNNQHVKVRFKFFYLLEPGVPAGTCPKDYVEINGEKYCGERSQFVVTSNSNKITVRFHSDQSYTDTGFLAEYLSYDSSDPCPGQFTCRTGRCIRKELRCDGWADCTDHSDELNCSCDAGHQFTCKNKFCKPLFWVCDSVNDCGDNSDEQGCSCPAQTFRCSNGKCLSKSQQCNGKDDCGDGSDEASCPKVNVVTCTKHTYRCLNGLCLSKGNPECDGKEDCSDGSDEKDCDCGLRSFTRQARVVGGTDADEGEWPWQVSLHALGQGHTCGASLISPNWLVSAAHCYIDDRGFRYSDPTQWTAFLGLHDQSQRSAPGVQERRLKRIISHPFFNDFTFDYDIALLELEKPAEYSSMVRPICLPDASHVFPAGKAIWVTGWGHTQDGGTLALILQKGEIRVINQTTCENLLPQYITPRMMCVGFLSGGVDSCQGDSGGPLSSVEADGRIFQAGVVSWGDGCAQRNFPGVYTRLPLFRDWIKENTGV

SEQ ID NO: 692 - protein, 855 aa, Homo sapiens
  Mutant MT-SP1 sequence; full length
  I41T/Y146D/G151L/Q175K/K224N
MGSDRARKGGGGPKDFGAGLKYNSRHEKVNGLEEGVEFLPVNNVKKVEKHGPGRWVVLAAVLIGLLLVLLGIGFLVWHLQYRDVRVQKVFNGYMRITNENFVDAYENSNSTEFVSLASKVKDALKLLYSGVPFLGPYHKESAVTAFSEGSVIAYYWSEFSIPQHLVEEAERVMAEERVVMLPPRARSLKSFVVTSVVAFPTDSKTVQRTQDNSCSFGLHARGVELMRFTTPGFPDSPYPAHARCQWALRGDADSVLSLTFRSFDLASCDERGSDLVTVYNTLSPMEPHALVQLCGTYPPSYNLTFHSSQNVLLITLITNTERRHPGFEATFFQLPRMSSCGGRLRKAQGTFNSPYYPGHYPPNIDCTWNIEVPNNQHVKVRFKFFYLLEPGVPAGTCPKDYVEINGEKYCGERSQFVVTSNSNKITVRFHSDQSYTDTGFLAEYLSYDSSDPCPGQFTCRTGRCIRKELRCDGWADCTDHSDELNCSCDAGHQFTCKNKFCKPLFWVCDSVNDCGDNSDEQGCSCPAQTFRCSNGKCLSKSQQCNGKDDCGDGSDEASCPKVNVVTCTKHTYRCLNGLCLSKGNPECDGKEDCSDGSDEKDCDCGLRSFTRQARVVGGTDADEGEWPWQVSLHALGQGHTCGASLISPNWLVSAAHCYIDDRGFRYSDPTQWTAFLGLHDQSQRSAPGVQERRLKRIISHPFFNDFTFDYDIALLELEKPAEYSSMVRPICLPDASHVFPAGKAIWVTGWGHTQDGGTLALILQKGEIRVINQTTCENLLPQKITPRMMCVGFLSGGVDSCQGDSGGPLSSVEADGRIFQAGVVSWGDGCAQRNNPGVYTRLPLFRDWIKENTGV

SEQ ID NO: 693 - protein, 855 aa, Homo sapiens
  Mutant MT-SP1 sequence; full length
  I41T/Y146D/G151L/Q175R/K224N
MGSDRARKGGGGPKDFGAGLKYNSRHEKVNGLEEGVEFLPVNNVKKVEKHGPGRWVVLAAVLIGLLLVLLGIGFLVWHLQYRDVRVQKVFNGYMRITNENFVDAYENSNSTEFVSLASKVKDALKLLYSGVPFLGPYHKESAVTAFSEGSVIAYYWSEFSIPQHLVEEAERVMAEERVVMLPPRARSLKSFVVTSVVAFPTDSKTVQRTQDNSCSFGLHARGVELMRFTTPGFPDSPYPAHARCQWALRGDADSVLSLTFRSFDLASCDERGSDLVTVYNTLSPMEPHALVQLCGTYPPSYNLTFHSSQNVLLITLITNTERRHPGFEATFFQLPRMSSCGGRLRKAQGTFNSPYYPGHYPPNIDCTWNIEVPNNQHVKVRFKFFYLLEPGVPAGTCPKDYVEINGEKYCGERSQFVVTSNSNKITVRFHSDQSYTDTGFLAEYLSYDSSDPCPGQFTCRTGRCIRKELRCDGWADCTDHSDELNCSCDAGHQFTCKNKFCKPLFWVCDSVNDCGDNSDEQGCSCPAQTFRCSNGKCLSKSQQCNGKDDCGDGSDEASCPKVNVVTCTKHTYRCLNGLCLSKGNPECDGKEDCSDGSDEKDCDCGLRSFTRQARVVGGTDADEGEWPWQVSLHALGQGHTCGASLISPNWLVSAAHCYIDDRGFRYSDPTQWTAFLGLHDQSQRSAPGVQERRLKRIISHPFFNDFTFDYDIALLELEKPAEYSSMVRPICLPDASHVFPAGKAIWVTGWGHTQDGGTLALILQKGEIRVINQTTCENLLPQRITPRMMCVGFLSGGVDSCQGDSGGPLSSVEADGRIFQAGVVSWGDGCAQRNNPGVYTRLPLFRDWIKENTGV

SEQ ID NO: 694 - protein, 855 aa, Homo sapiens
  Mutant MT-SP1 sequence; full length
  I41T/Y146D/G151L/Q175H/K224N
MGSDRARKGGGGPKDFGAGLKYNSRHEKVNGLEEGVEFLPVNNVKKVEKHGPGRWVVLAAVLIGLLLVLLGIGFLVWHLQYRDVRVQKVFNGYMRITNENFVDAYENSNSTEFVSLASKVKDALKLLYSGVPFLGPYHKESAVTAFSEGSVIAYYWSEFSIPQHLVEEAERVMAEERVVMLPPRARSLKSFVVTSVVAFPTDSKTVQRTQDNSCSFGLHARGVELMRFTTPGFPDSPYPAHARCQWALRGDADSVLSLTFRSFDLASCDERGSDLVTVYNTLSPMEPHALVQLCGTYPPSYNLTFHSSQNVLLITLITNTERRHPGFEATFFQLPRMSSCGGRLRKAQGTFNSPYYPGHYPPNIDCTWNIEVPNNQHVKVRFKFFYLLEPGVPAGTCPKDYVEINGEKYCGERSQFVVTSNSNKITVRFHSDQSYTDTGFLAEYLSYDSSDPCPGQFTCRTGRCIRKELRCDGWADCTDHSDELNCSCDAGHQFTCKNKFCKPLFWVCDSVNDCGDNSDEQGCSCPAQTFRCSNGKCLSKSQQCNGKDDCGDGSDEASCPKVNVVTCTKHTYRCLNGLCLSKGNPECDGKEDCSDGSDEKDCDCGLRSFTRQARVVGGTDADEGEWPWQVSLHALGQGHTCGASLISPNWLVSAAHCYIDDRGFRYSDPTQWTAFLGLHDQSQRSAPGVQERRLKRIISHPFFNDFTFDYDIALLELEKPAEYSSMVRPICLPDASHVFPAGKAIWVTGWGHTQDGGTLALILQKGEIRVINQTTCENLLPQHITPRMMCVGFLSGGVDSCQGDSGGPLSSVEADGRIFQAGVVSWGDGCAQRNNPGVYTRLPLFRDWIKENTGV

SEQ ID NO: 695 - protein, 855 aa, Homo sapiens
  Mutant MT-SP1 sequence; full length
  I41T/Y146D/G151L/Q175Y/K224N
MGSDRARKGGGGPKDFGAGLKYNSRHEKVNGLEEGVEFLPVNNVKKVEKHGPGRWVVLAAVLIGLLLVLLGIGFLVWHLQYRDVRVQKVFNGYMRITNENFVDAYENSNSTEFVSLASKVKDALKLLYSGVPFLGPYHKESAVTAFSEGSVIAYYWSEFSIPQHLVEEAERVMAEERVVMLPPRARSLKSFVVTSVVAFPTDSKTVQRTQDNSCSFGLHARGVELMRFTTPGFPDSPYPAHARCQWALRGDADSVLSLTFRSFDLASCDERGSDLVTVYNTLSPMEPHALVQLCGTYPPSYNLTFHSSQNVLLITLITNTERRHPGFEATFFQLPRMSSCGGRLRKAQGTFNSPYYPGHYPPNIDCTWNIEVPNNQHVKVRFKFFYLLEPGVPAGTCPKDYVEINGEKYCGERSQFVVTSNSNKITVRFHSDQSYTDTGFLAEYLSYDSSDPCPGQFTCRTGRCIRKELRCDGWADCTDHSDELNCSCDAGHQFTCKNKFCKPLFWVCDSVNDCGDNSDEQGCSCPAQTFRCSNGKCLSKSQQCNGKDDCGDGSDEASCPKVNVVTCTKHTYRCLNGLCLSKGNPECDGKEDCSDGSDEKDCDCGLRSFTRQARVVGGTDADEGEWPWQVSLHALGQGHTCGASLISPNWLVSAAHCYIDDRGFRYSDPTQWTAFLGLHDQSQRSAPGVQERRLKRIISHPFFNDFTFDYDIALLELEKPAEYSSMVRPICLPDASHVFPAGKAIWVTGWGHTQDGGTLALILQKGEIRVINQTTCENLLPQYITPRMMCVGFLSGGVDSCQGDSGGPLSSVEADGRIFQAGVVSWGDGCAQRNNPGVYTRLPLFRDWIKENTGV

SEQ ID NO: 696 - protein, 241 aa, Homo sapiens
  Mutant MT-SP1 sequence; protease domain
  I41T/Y146D/G151L/K224N
VVGGTDADEGEWPWQVSLHALGQGHTCGASLISPNWLVSAAHCYIDDRGFRYSDPTQWTAFLGLHDQSQRSAPGVQERRLKRIISHPFFNDFTFDYDIALLELEKPAEYSSMVRPICLPDASHVFPAGKAIWVTGWGHTQDGGTLALILQKGEIRVINQTTCENLLPQQITPRMMCVGFLSGGVDSCQGDSGGPLSSVEADGRIFQAGVVSWGDGCAQRNNPGVYTRLPLFRDWIKENTGV

SEQ ID NO: 697 - protein, 241 aa, Homo sapiens
  Mutant MT-SP1 sequence; protease domain
  Y146D/Q175D/K224N
VVGGTDADEGEWPWQVSLHALGQGHICGASLISPNWLVSAAHCYIDDRGFRYSDPTQWTAFLGLHDQSQRSAPGVQERRLKRIISHPFFNDFTFDYDIALLELEKPAEYSSMVRPICLPDASHVFPAGKAIWVTGWGHTQDGGTGALILQKGEIRVINQTTCENLLPQDITPRMMCVGFLSGGVDSCQGDSGGPLSSVEADGRIFQAGVVSWGDGCAQRNNPGVYTRLPLFRDWIKENTGV

SEQ ID NO: 698 - protein, 241 aa, Homo sapiens
  Mutant MT-SP1 sequence; protease domain
  I41T/Y146D/K224N
VVGGTDADEGEWPWQVSLHALGQGHTCGASLISPNWLVSAAHCYIDDRGFRYSDPTQWTAFLGLHDQSQRSAPGVQERRLKRIISHPFFNDFTFDYDIALLELEKPAEYSSMVRPICLPDASHVFPAGKAIWVTGWGHTQDGGTGALILQKGEIRVINQTTCENLLPQQITPRMMCVGFLSGGVDSCQGDSGGPLSSVEADGRIFQAGVVSWGDGCAQRNNPGVYTRLPLFRDWIKENTGV

SEQ ID NO: 699 - protein, 241 aa, Homo sapiens
  Mutant MT-SP1 sequence; protease domain
  Y146D/G151L/K224N
VVGGTDADEGEWPWQVSLHALGQGHICGASLISPNWLVSAAHCYIDDRGFRYSDPTQWTAFLGLHDQSQRSAPGVQERRLKRIISHPFFNDFTFDYDIALLELEKPAEYSSMVRPICLPDASHVFPAGKAIWVTGWGHTQDGGTLALILQKGEIRVINQTTCENLLPQQITPRMMCVGFLSGGVDSCQGDSGGPLSSVEADGRIFQAGVVSWGDGCAQRNNPGVYTRLPLFRDWIKENTGV

SEQ ID NO: 700 - protein, 241 aa, Homo sapiens
  Mutant MT-SP1 sequence; protease domain
  Y146D/Q175R/K224N
VVGGTDADEGEWPWQVSLHALGQGHICGASLISPNWLVSAAHCYIDDRGFRYSDPTQWTAFLGLHDQSQRSAPGVQERRLKRIISHPFFNDFTFDYDIALLELEKPAEYSSMVRPICLPDASHVFPAGKAIWVTGWGHTQDGGTGALILQKGEIRVINQTTCENLLPQRITPRMMCVGFLSGGVDSCQGDSGGPLSSVEADGRIFQAGVVSWGDGCAQRNNPGVYTRLPLFRDWIKENTGV

SEQ ID NO: 701 - protein, 241 aa, Homo sapiens
  Mutant MT-SP1 sequence; protease domain
  146D/Q175K/K224N
VVGGTDADEGEWPWQVSLHALGQGHICGASLISPNWLVSAAHCYIDDRGFRYSDPTQWTAFLGLHDQSQRSAPGVQERRLKRIISHPFFNDFTFDYDIALLELEKPAEYSSMVRPICLPDASHVFPAGKAIWVTGWGHTQDGGTGALILQKGEIRVINQTTCENLLPQKITPRMMCVGFLSGGVDSCQGDSGGPLSSVEADGRIFQAGVVSWGDGCAQRNNPGVYTRLPLFRDWIKENTGV

SEQ ID NO: 702 - protein, 241 aa, Homo sapiens
  Mutant MT-SP1 sequence; protease domain
  Y146D/Q175H/K224N
VVGGTDADEGEWPWQVSLHALGQGHICGASLISPNWLVSAAHCYIDDRGFRYSDPTQWTAFLGLHDQSQRSAPGVQERRLKRIISHPFFNDFTFDYDIALLELEKPAEYSSMVRPICLPDASHVFPAGKAIWVTGWGHTQDGGTGALILQKGEIRVINQTTCENLLPQHITPRMMCVGFLSGGVDSCQGDSGGPLSSVEADGRIFQAGVVSWGDGCAQRNNPGVYTRLPLFRDWIKENTGV

SEQ ID NO: 703 - protein, 241 aa, Homo sapiens
  Mutant MT-SP1 sequence; protease domain
  I41T/Y146D/G151L/Q175K/K224F
VVGGTDADEGEWPWQVSLHALGQGHTCGASLISPNWLVSAAHCYIDDRGFRYSDPTQWTAFLGLHDQSQRSAPGVQERRLKRIISHPFFNDFTFDYDIALLELEKPAEYSSMVRPICLPDASHVFPAGKAIWVTGWGHTQDGGTLALILQKGEIRVINQTTCENLLPQKITPRMMCVGFLSGGVDSCQGDSGGPLSSVEADGRIFQAGVVSWGDGCAQRNFPGVYTRLPLFRDWIKENTGV

SEQ ID NO: 704 - protein, 241 aa, Homo sapiens
  Mutant MT-SP1 sequence; protease domain
  I41T/Y146D/G151L/Q175R/K224F
VVGGTDADEGEWPWQVSLHALGQGHTCGASLISPNWLVSAAHCYIDDRGFRYSDPTQWTAFLGLHDQSQRSAPGVQERRLKRIISHPFFNDFTFDYDIALLELEKPAEYSSMVRPICLPDASHVFPAGKAIWVTGWGHTQDGGTLALILQKGEIRVINQTTCENLLPQRITPRMMCVGFLSGGVDSCQGDSGGPLSSVEADGRIFQAGVVSWGDGCAQRNFPGVYTRLPLFRDWIKENTGV

SEQ ID NO: 705 - protein, 241 aa, Homo sapiens
  Mutant MT-SP1 sequence; protease domain
  I41T/Y146D/G151L/Q175H/K224F
VVGGTDADEGEWPWQVSLHALGQGHTCGASLISPNWLVSAAHCYIDDRGFRYSDPTQWTAFLGLHDQSQRSAPGVQERRLKRIISHPFFNDFTFDYDIALLELEKPAEYSSMVRPICLPDASHVFPAGKAIWVTGWGHTQDGGTLALILQKGEIRVINQTTCENLLPQHITPRMMCVGFLSGGVDSCQGDSGGPLSSVEADGRIFQAGVVSWGDGCAQRNFPGVYTRLPLFRDWIKENTGV

SEQ ID NO: 706 - protein, 241 aa, Homo sapiens
  Mutant MT-SP1 sequence; protease domain
  I41T/Y146D/G151L/Q175Y/K224F
VVGGTDADEGEWPWQVSLHALGQGHTCGASLISPNWLVSAAHCYIDDRGFRYSDPTQWTAFLGLHDQSQRSAPGVQERRLKRIISHPFFNDFTFDYDIALLELEKPAEYSSMVRPICLPDASHVFPAGKAIWVTGWGHTQDGGTLALILQKGEIRVINQTTCENLLPQYITPRMMCVGFLSGGVDSCQGDSGGPLSSVEADGRIFQAGVVSWGDGCAQRNFPGVYTRLPLFRDWIKENTGV

SEQ ID NO: 707 - protein, 241 aa, Homo sapiens
  Mutant MT-SP1 sequence; protease domain
  I41T/Y146D/G151L/Q175K/K224N
VVGGTDADEGEWPWQVSLHALGQGHTCGASLISPNWLVSAAHCYIDDRGFRYSDPTQWTAFLGLHDQSQRSAPGVQERRLKRIISHPFFNDFTFDYDIALLELEKPAEYSSMVRPICLPDASHVFPAGKAIWVTGWGHTQDGGTLALILQKGEIRVINQTTCENLLPQKITPRMMCVGFLSGGVDSCQGDSGGPLSSVEADGRIFQAGVVSWGDGCAQRNNPGVYTRLPLFRDWIKENTGV

SEQ ID NO: 708 - protein, 241 aa, Homo sapiens
  Mutant MT-SP1 sequence; protease domain
  I41T/Y146D/G151L/Q175R/K224N
VVGGTDADEGEWPWQVSLHALGQGHTCGASLISPNWLVSAAHCYIDDRGFRYSDPTQWTAFLGLHDQSQRSAPGVQERRLKRIISHPFFNDFTFDYDIALLELEKPAEYSSMVRPICLPDASHVFPAGKAIWVTGWGHTQDGGTLALILQKGEIRVINQTTCENLLPQRITPRMMCVGFLSGGVDSCQGDSGGPLSSVEADGRIFQAGVVSWGDGCAQRNNPGVYTRLPLFRDWIKENTGV

SEQ ID NO: 709 - protein, 241 aa, Homo sapiens
  Mutant MT-SP1 sequence; protease domain
  I41T/Y146D/G151L/Q175H/K224N
VVGGTDADEGEWPWQVSLHALGQGHTCGASLISPNWLVSAAHCYIDDRGFRYSDPTQWTAFLGLHDQSQRSAPGVQERRLKRIISHPFFNDFTFDYDIALLELEKPAEYSSMVRPICLPDASHVFPAGKAIWVTGWGHTQDGGTLALILQKGEIRVINQTTCENLLPQHITPRMMCVGFLSGGVDSCQGDSGGPLSSVEADGRIFQAGVVSWGDGCAQRNNPGVYTRLPLFRDWIKENTGV

SEQ ID NO: 710 - protein, 241 aa, Homo sapiens
  Mutant MT-SP1 sequence; protease domain
  I41T/Y146D/G151L/Q175Y/K224N
VVGGTDADEGEWPWQVSLHALGQGHTCGASLISPNWLVSAAHCYIDDRGFRYSDPTQWTAFLGLHDQSQRSAPGVQERRLKRIISHPFFNDFTFDYDIALLELEKPAEYSSMVRPICLPDASHVFPAGKAIWVTGWGHTQDGGTLALILQKGEIRVINQTTCENLLPQYITPRMMCVGFLSGGVDSCQGDSGGPLSSVEADGRIFQAGVVSWGDGCAQRNNPGVYTRLPLFRDWIKENTGV
